(19) United States
(12) Patent Application Publication
(10) Pub. No.: US 2016/0024487 A1
(43) Pub. Date: Jan. 28, 2016

(54) THROMBIN SENSITIVE COAGULATION FACTOR X MOLECULES

(71) Applicant: NOVO NORDISK A/S, Bagsværd (DK)

(72) Inventors: Jens J. Hansen, Jyllinge (DK); Jens Breinholt, Dyssegaerd (DK); Jens Buchardt, Gentofte (DK); Kristoffer Winther Balling, Roedovre (DK); Prafull S. Gandhi, Ballerup (DK); Henrik Oestergaard, Oelstykke (DK); Grant E. Blouse, Koebenhavn S (DK)

(73) Assignee: NOVO NORDISK A/S, Bagsvaerd (DK)

(21) Appl. No.: 14/774,790

(22) PCT Filed: Mar. 12, 2014
(86) PCT No.: PCT/EP2014/054841

§ 371 Date: Sep. 11, 2015

Related U.S. Application Data
(60) Provisional application No. 61/781,156, filed on Mar. 14, 2013.

(30) Foreign Application Priority Data
Mar. 12, 2013 (EP) 13158721.4

(51) Int. Cl. C12N 9/64

(52) U.S. Cl. CPC C12N 9/6432; A61K 38/00

(57) ABSTRACT

The present invention relates to thrombin sensitive coagulation Factor X (FX), as well as use thereof in medicine. In particular the invention relates to FX molecules comprising 2 to 10 amino acid modifications in the activation peptide N-terminally of the FX “IVGG” motif as well as compositions comprising such molecules and use thereof. Such molecules may be useful in connection with convenient and patient friendly treatment regimens in treatment and prophylaxis of haemophilia.

### TECHNICAL FIELD

[0001] The present invention relates to thrombin sensitive Factor X molecules as well as therapeutic and/or prophylactic use thereof.

### BACKGROUND OF THE INVENTION

[0002] Thrombin (coagulation Factor II/FIIa) is a trypsin like serine protease formed by activation of prothrombin. Thrombin is a central component of the blood coagulation cascade as its protease activity converts soluble fibrinogen into insoluble strands of fibrin, by release of Fibrinopeptide A, as well as catalysing many other coagulation-related reactions, including activation of FV, and FVIII. Thrombin cleavage sites are thus found in nature in proteins involved in coagulation.

[0003] Haemophilia is an inherited deficiency in a blood clotting factor—usually Factor VIII (FVIII)—that causes increased bleeding. Current treatment of haemophilia is based on protein replacement therapy. A particular therapeutic conundrum is the development of “inhibitors” (antibodies against coagulation factors).

[0004] Activated Factor VII (NovoSeven®) for intravenous (IV) administration has become available as a very effective “by-passing” therapy for patients with haemophilia and haemophilia with inhibitors. Factor Vila has an in vivo circulatory half-life of about 4-5 hours and it is thus desirable to provide alternative and more convenient by-passing treatment options for haemophilia patients with and without inhibitors.

[0005] Endogenous Factor X (FX) has a relatively long in vivo circulatory half-life (about 20 hours to 40 hours) and has therefore previously been suggested as a candidate for by-passing treatment of haemophilia and haemophilia with inhibitors. It is known from e.g. WO03035861 and WO2010070137 that recombinant FX variants fused with a 10 amino acid Fibrinopeptide A peptide are thrombin sensitive. Insertion of additional protease cleavage sites in FX is furthermore disclosed in US2009053185A1 and US2006148038.

[0006] Thrombin sensitivity of FX molecules will potentially result in improved and more convenient treatment options for haemophilia patients with and without inhibitors. More convenient treatment options for haemophilia patients will potentially also translate into improved compliance of prophylactic and on-demand treatments. There is thus a need in the art for further improving thrombin sensitivity of coagulation factor proteins such as FX. There is furthermore a need in the art for providing thrombin sensitive FX molecules being safe in use with regard to formation of inhibitors. There is furthermore a need in the art for thrombin sensitive FX molecules essentially without auto-activation properties. There is furthermore a need in the art for thrombin sensitive FX molecules with a long in vivo circulatory half-life and thus enabling more convenient treatments options. There is furthermore a need in the art for providing thrombin sensitive FX molecules, wherein the activated form of said molecules is essentially similar to activated wild type FX. Finally, there is a need in the art for thrombin sensitive FX molecules having low major histocompatibility complex class II (MHC II) affinity and thus low risk of inducing neutralizing anti-drug antibodies.

### SUMMARY OF THE INVENTION

[0007] The present invention relates to Factor X (FX) molecules comprising 2 to 10 amino acid modifications in the activation peptide N-terminally of the FX “IVGG” motif as well as compositions comprising such molecules and use thereof. Such compounds may be useful in connection with convenient and patient friendly treatment regimens in treatment and prophylaxis of haemophilia.

[0008] That is, the invention relates to methods of treating or preventing haemophilia, wherein said methods comprise administering a suitable dose of a thrombin sensitive Factor X molecule of the invention to a patient in need thereof.

[0009] In particular the invention provides thrombin sensitive Factor X molecules comprising 2 to 10 amino acid modifications N-terminally of the “IVGG” motif (amino acids 195 to 198 in SEQ ID NO: 1) in wild type Factor X, said modifications being in any of the positions X₁₀ to X₁ upstream of the “IVGG” motif: X₁₀, X₉, X₈, X₇, X₆, X₅, X₄, X₃, X₂, X₁, I, V, G, G wherein X₁₀ to X₁ can be any naturally occurring amino acid.

[0010] In one embodiment the thrombin sensitive Factor X molecule comprises a X₈-X₁ sequence wherein X₈ is N, X₇ is N, X₆ is A, X₅ is T, X₄ is selected from the group consisting of L, I, M, F, V, P or W, X₃ is selected from the group consisting of Q, M, R, T, W, K, I, or V, X₂ is P, and X₁ is R.

[0011] In another embodiment the thrombin sensitive Factor X molecule comprises a X₈ to X₁ sequence wherein X₈ is R, X₇ is G, X₆ is D, X₅ is N, X₄ is selected from the group consisting of L, I, M, F, V, P or W, X₃ is selected from the group consisting of T or S, X₂ is P and X₁ is R.

[0012] In another embodiment the thrombin sensitive Factor X molecule comprises a X₉ to X₁ sequence wherein X₉ is A, X₈ is T, X₇ is N, X₆ is A, X₅ is T, X₄ is selected from the group consisting of F, L, M, W, A, I, V and P, X₃ is selected from the group consisting of T, K, Q, P, S, Y, R, A, V, W, I and H, X₂ is P, and X₁ is R.

[0013] In yet another embodiment the thrombin sensitive Factor X molecule comprises a X₁₀ to X₁ sequence wherein X₁₀ is P, X₉ is E, X₈ is R, X₇ is G, X₆ is D, X₅ is N, X₄ is selected from the group consisting of L, I, M, F, V, P or W, X₃ is selected from the group consisting of T or S, X₂ is P, and X₁ is R.

[0014] In yet another embodiment the thrombin sensitive Factor X molecule comprises a X₁₀ to X₁ sequence wherein X₁₀ is P, X₉ is E, X₈ is R, X₇ is G, X₆ is D, X₅ is N, X₄ is L, X₃ is T, X₂ is P, and X₁ is R.

[0015] In yet another embodiment the thrombin sensitive Factor X molecule comprises a X₁₀ to X₁ sequence wherein X₁₀ is P, X₉ is E, X₈ is R, X₇ is G, X₆ is D, X₅ is N, X₄ is M, X₃ is T, X₂ is P, and X₁ is R.

[0016] In yet another embodiment the thrombin sensitive Factor X molecule comprises a X₁₀ to X₁ sequence wherein X₁₀ is P, X₉ is E, X₈ is R, X₇ is G, X₆ is D, X₅ is N, X₄ is M, X₃ is T, X₂ is P, and X₁ is R.

[0017] In yet another embodiment the thrombin sensitive Factor X molecule comprises a X₁₀ to X₁ sequence wherein X₁₀ is P, X₉ is E, X₈ is R, X₇ is N, X₆ is A, X₅ is T, X₄ is L, X₃ is T, X₂ is P and X₁ is R.

[0018] In yet another embodiment the thrombin sensitive Factor X molecule comprises a X₁₀ to X₁ sequence wherein X₁₀ is G, X₉ is D, X₈ is N, X₇ is N, X₆ is A, X₅ is T, X₄ is L, X₃ is T, X₂ is P and X₁ is R.

[0019] In yet another embodiment the thrombin sensitive Factor X molecule comprises a X₁₀ to X₁ sequence wherein X₁₀ is G, X₉ is G, X₈ is G, X₇ is N, X₆ is A, X₅ is T, X₄ is L, X₃ is D, X₂ is P, and X₁ is R.

[0020] In yet another embodiment the thrombin sensitive Factor X molecule comprises a X₁₀ to X₁ sequence wherein X₁₀ is S, X₉ is T, X₈ is P, X₇ is S, X₆ is I, X₅ is L, X₄ is L, X₃ is K, X₂ is P, and X₁ is R.

[0021] In yet another embodiment the thrombin sensitive Factor X molecule comprises a X₁₀ to X₁ sequence wherein X₁₀ is T, X₉ is R, X₈ is P, X₇ is S, X₆ is I, X₅ is L, X₄ is F, X₃ is T, X₂ is P, and X₁ is R.

[0022] In yet another embodiment the thrombin sensitive Factor X molecule comprises a X₁₀-X₁ sequence wherein X₁₀ is D, X₉ is F, X₈ is L, X₇ is A, X₆ is E, X₅ is G, X₄ is G, X₃ is G, X₂ is P, and X₁ is R.

[0023] In yet another embodiment the thrombin sensitive Factor X molecule comprises a X₁₀-X₁ sequence wherein X₁₀ is N, X₉ is E, X₈ is S, X₇ is T, X₆ is T, X₅ is K, X₄ is I, X₃ is K, X₂ is P, and X₁ is R.

[0024] In one embodiment the thrombin sensitive FX molecules of the invention may be protracted and have increased circulating half-life compared to a non-protracted FX molecule.

### BRIEF DESCRIPTION OF THE FIGURES

[0025] FIG. 1 shows the structure of the Factor X zymogen (including the RKR tripeptide).

[0026] FIG. 2 shows functionalization of glycyl sialic acid cytidine monophosphate (GSC) with a benzaldehyde group. GSC is acylated with 4-formylbenzoic acid and subsequently reacted with heparosan (HEP)-amine by a reductive amination reaction.

[0027] FIG. 3 shows functionalization of heparosan (HEP) polymer with a benzaldehyde group and subsequent reaction with glycyl sialic acid cytidine monophosphate (GSC) in a reductive amination reaction.

[0028] FIG. 4 shows functionalization of glycyl sialic acid cytidine monophosphate (GSC) with a thio group and subsequent reaction with a maleimide functionalized heparosan (HEP) polymer.

[0029] FIGS. 5-8 show the protein design strategies and illustrate modifications to the wild type Factor X sequence used to generate thrombin sensitive Factor X molecules.

[0030] FIG. 9 shows plasma Factor X concentrations versus time in FVIII-KO mice. The concentrations were measured by the antigen based assay after dosing the mice IV with 16.7 nmol/kg (1 mg FX/kg) of pdFX and 40 kDa HEP-[N]-pdFX. Results are mean±SD in a semi-logarithmic plot, n=3.

[0031] FIG. 10 shows a graphical representation of the final FX-AP-FpA-HPC4 construct (SEQ ID NO: 6).

### BRIEF DESCRIPTION OF THE SEQUENCE LISTING

[0032] SEQ ID NO: 1 shows the amino acid sequence of wild type mature human coagulation Factor X (zymogen).

[0033] SEQ ID NO: 2 shows the generic amino acid sequence of wild type IVGG motif and positions 2-10 upstream of the IVGG motif which may be modified.

[0034] SEQ ID NO: 3 shows the sequence of a FX-AP-FpA fusion protein disclosed in WO2010070137.

[0035] SEQ ID NO: 4 shows the nucleotide sequence used herein of a FX-AP-FpA fusion protein disclosed in WO2010070137.

[0036] SEQ ID NOs: 5-236 shows the nucleotide and amino acid sequence of thrombin sensitive mature human coagulation Factor X molecules (zymogen). Sequences are listed pairwise. For example SEQ ID NO: 5 is the nucleotide sequence encoding the polypeptide for which the amino acid sequence is listed in SEQ ID NO: 6 (FX ins[194]>[DFLAEGGGVR]-HPC4) and so forth.

[0037] SEQ ID NOs: 237 and 238 shows the sequence of a quenched fluorescence peptide substrate.

[0038] SEQ ID NO: 239 shows the open sequence of rationally designed QF-substrates.

[0039] SEQ ID NO: 240 shows a Fibrinopeptide A (FpA) substrate sequence.

[0040] SEQ ID NO: 241 shows a PAR 1 control substrate sequence.

[0041] SEQ ID NO: 242 shows a positional scanning library sequence with open positions X₄ and X₃.

[0042] SEQ ID NOs: 243-246 show the nucleotide sequence of the primers used for generating the two PCR fragments and for amplification of the fusion of the two fragments used in the cloning of FX-AP-FpA.

### DESCRIPTION

[0043] The present invention relates to thrombin sensitive FX molecules. Such molecules can e.g. be used for prophylaxis and treatment of patients suffering from haemophilia with and without inhibitors.

[0044] Thrombin is a “trypsin-like” serine protease encoded by the F2 gene in humans. Prothrombin (coagulation Factor II) is proteolytically cleaved to form thrombin in connection with the coagulation cascade. Thrombin in turn acts as a serine protease that converts soluble fibrinogen into insoluble strands of fibrin, as well as catalysing many other coagulation-related reactions.

[0045] Factor X molecules according to the present invention are “thrombin sensitive”, meaning that they can be proteolytically cleaved by thrombin. Preferably, Factor X molecules according to the present invention have thrombin sensitivity with a k_{cat}/K_{M} of at least 4.0E+02 M⁻¹ s⁻¹, preferably at least 4.0E+03 M⁻¹ s⁻¹ or 4.0E+04 M⁻¹ s⁻¹. Thrombin sensitivity of a peptide sequence and/or a coagulation factor according to the invention can be measured in e.g. chromogenic, fluorogenic, or quenched fluorescence assays (examples) generally used for measuring FXa, wherein FXa is proteolytically activated Factor X

[0046] Factor X molecules according to the present invention comprise 2 to 10 amino acid modifications which includes but is not limited to mutations/alterations/insertion(-s)/substitution(-s) and/or deletion(-s) (such as e.g. 2, 3, 4, 5, 6, 7, 8, 9, 10, 2-10, 2-9, 2-8, 2-7, 2-6, 2-5 2-4, 2-3, or 3-4 amino acid modifications) N-terminally of the IVGG motif positioned at amino acids 195-198 in the amino acid sequence as set forth in SEQ ID NO: 1. In connection with the present invention, the following numbering scheme is used for the first 10 amino acids N-terminally positioned in relation to the IVGG site (residues 185-194): X₁₀ (corresponding to Arg185 in SEQ ID NO: 1), X₉, X₈, X₇, X₆, X₅, X₄, X₃, X₂, X₁ (corresponding to Arg194 in SEQ ID NO 1), I, V, G, G (SEQ ID NO: 2). It thus follows, that 2 to 10 of the X₁₀-X₁ amino acids according to SEQ ID NO: 2 are modified relative to the corresponding sequence in the wild type Factor X sequence. In one embodiment, the amino acid modification can comprise a conservative amino acid substitution, or more than one conservative amino acid substitutions. In another embodiment, the amino acid modification can comprise a non-conservative amino acid substitution or more than one non-conservative substitution. For the purposes of clarity, the term “conservative amino acid substitution” refers to a substitution of amino acids having side chains with similar biochemical properties (e.g., non-polar and aliphatic, aromatic, hydrophobic, acidic, basic, and polar, uncharged). Conversely, a “non-conservative amino acid substitution” refers to substitution of amino acids having side chains with different biochemical properties. In another embodiment, the amino acid modifications can be in the form of an insertion of an amino acid or more than one amino acids, for example consecutive amino acids or non-consecutive amino acids. In yet another embodiment, the amino acid modifications can be in the form of a deletion of an amino acid, or a deletion of more than one amino acids, for example consecutive amino acids or non-consecutive amino acids. In yet another embodiment, the amino acid modification can comprise multiple amino acid modifications, e.g., a substitution(s), insertion(s), and/or deletion(s). For example, one or more amino acid substitutions can be combined with one or more amino acid insertions and/or deletions—in which the insertions and deletions can be consecutive or non-consecutive. The X₁₀-X₁ amino acids N-terminal of the IVGG motif thus comprise amino acids derived from the native Factor X sequence as well as amino acid substitutions, and/or deletions and/or insertions. The advantage being that FX molecules according to the invention have relatively few amino acid alterations compared to wild type Factor X and thus theoretically a safer profile in relation to e.g. risk of developing inhibitory drug antibodies. Factor X molecules according to the invention, furthermore, preferably have a relatively long in vivo circulatory half-life, enabling administration of said molecule for prophylaxis and/or treatment on a daily basis, three times a week, twice a week, once a week, once every second week, once every third week, or once monthly. FX molecules according to the invention, once activated, preferably resemble the activated form of wild type Factor X.

[0047] “MHC affinity”: The affinity of FX molecules according to the present invention towards major histocompatibility complex II molecules (MHCII affinity) can be predicted using either in silico based methods, in vitro assays or in vivo studies. In silico prediction of binding can be performed using software such as NetMHCIIpan-2.0 software (Nielsen et al. (2010) Immunome research, 6(1), 9) or NetMHCIIpan 2.1 for HLA-DR predictions (Nielsen et al., (2010) Immunome Research, 6:9) and NetMHCII 2.2 for HLA-DP/DQ predictions (Nielsen et al., (2009) BMC Bioinformatics 10:296), which estimate how binding of a given peptide sequence ranks among a large set of random peptides. In vitro assessment of binding can encompass measurements of peptide binding to recombinant MHCII molecules or using T-cell stimulation assays in which proteins or peptides are exposed to antigen presenting cells which digest the protein/peptide and present fragments of it on their MHCII molecules for recognition by the T-cell receptor; positive recognition will stimulate proliferation of the T-cell line. In vivo assessment of MHCII binding can be studied in e.g. a break of tolerance model in which animals have been tolerized to human wild type Factor X and are then exposed to thrombin sensitive Factor X variants and the development of anti Factor X variant specific antibodies monitored with respect to e.g. titers and time of occurrence.

[0048] Factor X (FX) is a vitamin K-dependent coagulation factor with structural similarities to Factor VII, prothrombin, Factor IX (FIX), and protein C. It is synthesised with a 40-residue pre-pro-sequence containing a hydrophobic signal sequence (Aa1-31) that targets the protein for secretion. The pro-peptide is important for directing γ-carboxylation to the light chain of Factor X. The circulating human Factor X zymogen consists of 445 amino acids divided into four distinct domains comprising an N-terminal gamma-carboxyglutamic acid rich (Gla) domain, two EGF domains, and a C-terminal trypsin-like serine protease domain. The mature two-chain form of Factor X consists of a light chain (amino acids 41-179 (numbering according to the immature amino acid sequence)) and a heavy chain (amino acids 183-488) held together by a disulfide bridge (Cys¹⁷²-Cys³⁴² (immature amino acid sequence)) and by an excised Arg¹⁸⁰-Lys¹⁸¹-Arg¹⁸² (RKR) tripeptide found at the C-terminal end of the Factor X light chain (immature amino acid sequence). The light chain contains 11 Gla residues, which are important for Ca²⁺-dependent binding of Factor X to negatively charged phospholipid membranes. Wild type human coagulation Factor X has two N-glycosylation sites (Asn²²¹ and Asn²³¹ (immature amino acid sequence)) and two 0-glycosylation sites (Thr¹⁹⁹ and Thr²¹¹ (immature amino acid sequence)) in the activation peptide (AP). It has previously been shown that the N-glycans in the activation peptide appear to be mainly responsible for the relatively long half-life of endogenous Factor X. β-hydroxylation occurs at Asp¹⁰³ in the first EGF domain (immature amino acid sequence), resulting in 6-hydroxyaspartic acid (Hya). FIG. 1 is a structural depiction of the FX zymogen (including the RKR tripeptide) with numbering according to the mature Factor X polypeptide.

[0049] Activation of Factor X occurs by limited thrombin proteolysis at Arg²³⁴-Ile²³⁵ releasing a 52 amino acid activation peptide (amino acids 183-234). To resemble wild type Factor X following activation, Factor X molecules according to the present invention preferably comprise the wild type Factor X prime site sequence of IVGG (Ile²³⁵, Val²³⁶, Gly²³⁷, Gly²³⁸—corresponding to amino acids 195-198 according to SEQ ID NO: 1) at the activation cleavage site. Factor X molecules according to the present invention comprise 2 to 10 alterations/modifications in the X₁₀-X₁ amino acid residues according to SEQ ID NO: 2 that result in increased thrombin sensitivity. In assays that measure the rates of thrombin cleavage of quenched fluorescence thrombin substrates with identical X₄-X₁ residues (and prime-site IVGG), but having varied X₈-X₅ amino acids have similar k_{cat}/K_{M} values (see example 3). Preferably, an N-linked glycan corresponding to Asn²³¹ (numbering according to the immature molecule) is retained in the present position (or optionally at a different position if insertions and/or deletions have been introduced).

[0050] Administration of thrombin sensitive Factor X molecules according to the present invention is thought to be able to “boost” thrombin generation/production, thereby having the potential to “by-pass” e.g. FVIII and/or FIX deficiency. Molecules according to the present invention are thus being suitable for treatment of haemophilia A or B, with and without inhibitors as well as Factor X deficiency. Use of Factor X molecules according to the present invention is thought to enable convenient and patient friendly regiments where administration can take place e.g. twice a week, once a week, once every second week, once every third week, once a month or once every second month.

[0051] “Factor X deficiency” is a rare autosomal recessive bleeding disorder with an incidence of 1:1,000,000 in the general population (Dewerchin et al. (2000) Thromb Haemost 83: 185-190). Although it produces a variable bleeding tendency, patients with a severe Factor X deficiency tend to be the most seriously affected among patients with rare coagulation defects. The prevalence of heterozygous Factor X deficiency is about 1:500, but is usually clinically asymptomatic.

[0052] One example of a “wild type Factor X” is the full length mature human FX molecule, as shown in SEQ ID NO: 1.

[0053] “Factor X” or “FX” herein refers to any functional Factor X protein molecule capable of activating prothrombin, including functional fragments, analogues and derivatives of SEQ ID NO: 1. “Factor X molecules” or “FX molecules” is used broadly and comprise both wild type FX and the thrombin sensitive FX derivatives according to the present invention.

[0054] Factor X molecules according to the present invention preferably have wild type Factor X activity in the activated form. In one embodiment, Factor X molecules according to the invention are at least 90% identical (preferably at least 91%, 92%, 93%, 94%, 95%, 96%, 97%, 98%, or 99% identical) with wild type Factor X—the zymogen amino acid sequence thereof is as set forth in SEQ ID NO: 1. Preferably, activated Factor X molecules according to the invention are identical to wild type activated Factor X, in which case all amino acid modifications are placed e.g. within the activation peptide.

[0055] Factor X according to the invention is a recombinant protein produced using well known methods of production and purification. The degree and location of glycosylation, γ-carboxylation and other post-translational modifications may vary depending on the chosen host cell and its growth conditions.

### Further Description of the Sequences

[0056] SEQ ID NO: 1 gives the amino acid sequence of wild type mature human coagulation Factor X (zymogen). Activation peptide marked with bold—light chain marked with lower case letters and heavy chain marked with underline, positions corresponding to the X₁₀-X₁ amino acids are marked with bold and underline, and the IVGG motif are shown with enlarged capital bold and underlined letters:

ansfleemkkghlerecmeetcsyeearevfedsdktnefwnkykdgdq
cetspcqnqgkckdglgeytctclegfegkncelftrklcsldngdcdq
fcheeqnsvvcscargytladngkaciptgpypcgkqtlerrkrSVAQA
TSSSGEAPDSITWKPYDAADLDPTENPFDLLDFNQTQ [symbol]
GGTILSEFYIL
TAAHCLYQAKRFKVRVGDRNTEQEEGGEAVHEVEVVIKHNRFTKETYDF
DIAVLRLKTPITFRMNVAPACLPERDWAESTLMTQKTGIVSGFGRTHEK
GRQSTRLKMLEVPYVDRNSCKLSSSFIITQNMFCAGYDTKQEDACQGDS
GGPHVTRFKDTYFVTGIVSWGEGCARKGKYGIYTKVTAFLKWIDRSMKT
RGLPKAKSHAPEVITSSPLK

[0057] SEQ ID NO: 2 gives the amino acid sequence framework for Factor X molecules according to the present invention which comprises the IVGG motif from the wild type molecule and from 2 to 10 amino acid modifications in the region upstream of the IVGG motif: X₁₀, X₉, X₈, X₇, X₆, X₅, X₄, X₃, X₂, X₁, I, V, G, G

[0058] SEQ ID NO: 3 gives the amino acid sequence of an FX-FpA fusion protein disclosed in WO2010070137. Activation peptide is shown in bold, the inserted FpA sequence is shown in italics and heavy chain shown in underline.

ansfleemkkghlerecmeetcsyeearevfedsdktnefwnkykdgd
qcetspcqnqgkckdglgeytctclegfegkncelftrklcsldngdc
dqfcheeqnsvvcscargytladngkaciptgpypcgkqtlerrkrSV
AQATSSSGEAPDSITWKPYDAADLDPTENPFDLLDFNQTQPERGDNNL
TRDFLAEGGGVRIVGGQECKDGECPWQALLINEENEGFCGGTILSEFY
ILTAAHCLYQAKRFKVRVGDRNTEQEEGGEAVHEVEVVIKHNRFTKET
YDFDIAVLRLKTPITFRMNVAPACLPERDWAESTLMTQKTGIVSGFGR
THEKGRQSTRLKMLEVPYVDRNSCKLSSSFIITQNMFCAGYDTKQEDA
CQGDSGGPHVTRFKDTYFVTGIVSWGEGCARKGKYGIYTKVTAFLKWI
DRSMKTRGLPKAKSHAPEVITSSPLK

[0059] SEQ ID NOs: 5-236 give the amino acid sequences for thrombin sensitive human coagulation Factor X molecules (zymogen). For the selected exemplar mature thrombin sensitive human coagulation Factor X molecules listed below, the activation peptide is shown in bold; light chain marked with lower case letters and heavy chain are shown in underline, positions corresponding to the X₁₀-X₁ amino acids are shown in bold and underline, amino acid modifications (modification/mutations/alterations) are shown in bold, underline and italics and the IVGG motif is shown in enlarged CAPITAL, bold and underlined letters:

SEQ ID NO: 16
ansfleemkkghlerecmeetcsyeearevfedsdktnefwnkykdgdq
cetspcqnqgkckdglgeytctclegfegkncelftrklcsldngdcdq
fcheeqnsvvcscargytladngkaciptgpypcgkqtlerrkrSVAQA
TSSSGEAPDSITWKPYDAADLDPTENPFDLLDFNQTQPER [symbol]
EGFCGGTILSEFYI
LTAAHCLYQAKRFKVRVGDRNTEQEEGGEAVHEVEVVIKHNRFTKETY
DFDIAVLRLKTPITFRMNVAPACLPERDWAESTLMTQKTGIVSGFGRT
HEKGRQSTRLKMLEVPYVDRNSCKLSSSFIITQNMFCAGYDTKQEDAC
QGDSGGPHVTRFKDTYFVTGIVSWGEGCARKGKYGIYTKVTAFLKWID
RSMKTRGLPKAKSHAPEVITSSPLK
SEQ ID NO: 20
ansfleemkkghlerecmeetcsyeearevfedsdktnefwnkykdgdq
cetspcqnqgkckdglgeytctclegfegkncelftrklcsldngdcdq
fcheeqnsvvcscargytladngkaciptgpypcgkqtlerrkrSVAQA
TSSSGEAPDSITWKPYDAADLDPTENPFDLLDFNQTQPER [symbol]
EGFCGGTILSEFYI
LTAAHCLYQAKRFKVRVGDRNTEQEEGGEAVHEVEVVIKHNRFTKETYD
FDIAVLRLKTPITFRMNVAPACLPERDWAESTLMTQKTGIVSGFGRTHE
KGRQSTRLKMLEVPYVDRNSCKLSSSFIITQNMFCAGYDTKQEDACQGD
SGGPHVTRFKDTYFVTGIVSWGEGCARKGKYGIYTKVTAFLKWIDRSMK
TRGLPKAKSHAPEVITSSPLK
SEQ ID NO: 24
ansfleemkkghlerecmeetcsyeearevfedsdktnefwnkykdgdq
cetspcqnqgkckdglgeytctclegfegkncelftrklcsldngdcdq
fcheeqnsvvcscargytladngkaciptgpypcgkqtlerrkrSVAQA
TSSSGEAPDSITWKPYDAADLDPTENPFDLLDFNQTQPER [symbol]
EGFCGGTILSEFYI
LTAAHCLYQAKRFKVRVGDRNTEQEEGGEAVHEVEVVIKHNRFTKETYD
FDIAVLRLKTPITFRMNVAPACLPERDWAESTLMTQKTGIVSGFGRTHE
KGRQSTRLKMLEVPYVDRNSCKLSSSFIITQNMFCAGYDTKQEDACQGD
SGGPHVTRFKDTYFVTGIVSWGEGCARKGKYGIYTKVTAFLKWIDRSMK
TRGLPKAKSHAPEVITSSPLK
SEQ ID NO: 28
ansfleemkkghlerecmeetcsyeearevfedsdktnefwnkykdgdq
cetspcqnqgkckdglgeytctclegfegkncelftrklcsldngdcdq
fcheeqnsvvcscargytladngkaciptgpypcgkqtlerrkrSVAQA
TSSSGEAPDSITWKPYDAADLDPTENPFDLLDFNQTQPER [symbol]
EGFCGGTILSEFYI
LTAAHCLYQAKRFKVRVGDRNTEQEEGGEAVHEVEVVIKHNRFTKETYD
FDIAVLRLKTPITFRMNVAPACLPERDWAESTLMTQKTGIVSGFGRTHE
KGRQSTRLKMLEVPYVDRNSCKLSSSFIITQNMFCAGYDTKQEDACQGD
SGGPHVTRFKDTYFVTGIVSWGEGCARKGKYGIYTKVTAFLKWIDRSMK
TRGLPKAKSHAPEVITSSPLK
SEQ ID NO: 32
ansfleemkkghlerecmeetcsyeearevfedsdktnefwnkykdgdq
cetspcqnqgkckdglgeytctclegfegkncelftrklcsldngdcdq
fcheeqnsvvcscargytladngkaciptgpypcgkqtlerrkrSVAQA
TSSSGEAPDSITWKPYDAADLDPTENPFDLLDFNQTQPER [symbol]
EGFCGGTILSEFYI
LTAAHCLYQAKRFKVRVGDRNTEQEEGGEAVHEVEVVIKHNRFTKETYD
FDIAVLRLKTPITFRMNVAPACLPERDWAESTLMTQKTGIVSGFGRTHE
KGRQSTRLKMLEVPYVDRNSCKLSSSFIITQNMFCAGYDTKQEDACQGD
SGGPHVTRFKDTYFVTGIVSWGEGCARKGKYGIYTKVTAFLKWIDRSMK
TRGLPKAKSHAPEVITSSPLK
SEQ ID NO: 36
ansfleemkkghlerecmeetcsyeearevfedsdktnefwnkykdgdq
cetspcqnqgkckdglgeytctclegfegkncelftrklcsldngdcdq
fcheeqnsvvcscargytladngkaciptgpypcgkqtlerrkrSVAQA
TSSSGEAPDSITWKPYDAADLDPTENPFDLLDFNQTQPER [symbol]
GFCGGTILSEFYI
LTAAHCLYQAKRFKVRVGDRNTEQEEGGEAVHEVEVVIKHNRFTKETYD
FDIAVLRLKTPITFRMNVAPACLPERDWAESTLMTQKTGIVSGFGRTHE
KGRQSTRLKMLEVPYVDRNSCKLSSSFIITQNMFCAGYDTKQEDACQGD
SGGPHVTRFKDTYFVTGIVSWGEGCARKGKYGIYTKVTAFLKWIDRSMK
TRGLPKAKSHAPEVITSSPLK
SEQ ID NO: 40
ansfleemkkghlerecmeetcsyeearevfedsdktnefwnkykdgdq
cetspcqnqgkckdglgeytctclegfegkncelftrklcsldngdcdq
fcheeqnsvvcscargytladngkaciptgpypcgkqtlerrkrSVAQA
TSSSGEAPDSITWKPYDAADLDPTENPFDLLDFNQTQPER [symbol]
GFCGGTILSEFYI
LTAAHCLYQAKRFKVRVGDRNTEQEEGGEAVHEVEVVIKHNRFTKETYD
FDIAVLRLKTPITFRMNVAPACLPERDWAESTLMTQKTGIVSGFGRTHE
KGRQSTRLKMLEVPYVDRNSCKLSSSFIITQNMFCAGYDTKQEDACQGD
SGGPHVTRFKDTYFVTGIVSWGEGCARKGKYGIYTKVTAFLKWIDRSMK
TRGLPKAKSHAPEVITSSPLK
SEQ ID NO: 48
ansfleemkkghlerecmeetcsyeearevfedsdktnefwnkykdgdq
cetspcqnqgkckdglgeytctclegfegkncelftrklcsldngdcdq
fcheeqnsvvcscargytladngkaciptgpypcgkqtlerrkrSVAQA
TSSSGEAPDSITWKPYDAADLDPTENPFDLLDFNQTQPER [symbol]
GFCGGTILSEFYI
LTAAHCLYQAKRFKVRVGDRNTEQEEGGEAVHEVEVVIKHNRFTKETYD
FDIAVLRLKTPITFRMNVAPACLPERDWAESTLMTQKTGIVSGFGRTHE
KGRQSTRLKMLEVPYVDRNSCKLSSSFIITQNMFCAGYDTKQEDACQGD
SGGPHVTRFKDTYFVTGIVSWGEGCARKGKYGIYTKVTAFLKWIDRSMK
TRGLPKAKSHAPEVITSSPLK
SEQ ID NO 52:
ansfleemkkghlerecmeetcsyeearevfedsdktnefwnkykdgdq
cetspcqnqgkckdglgeytctclegfegkncelftrklcsldngdcdq
fcheeqnsvvcscargytladngkaciptgpypcgkqtlerrkrSVAQA
TSSSGEAPDSITWKPYDAADLDPTENPFDLLDFNQTQPER [symbol]
EGFCGGTILSEFYI
LTAAHCLYQAKRFKVRVGDRNTEQEEGGEAVHEVEVVIKHNRFTKETYD
FDIAVLRLKTPITFRMNVAPACLPERDWAESTLMTQKTGIVSGFGRTHE
KGRQSTRLKMLEVPYVDRNSCKLSSSFIITQNMFCAGYDTKQEDACQGD
SGGPHVTRFKDTYFVTGIVSWGEGCARKGKYGIYTKVTAFLKWIDRSMK
TRGLPKAKSHAPEVITSSPLK
SEQ ID NO: 56
ansfleemkkghlerecmeetcsyeearevfedsdktnefwnkykdgdq
cetspcqnqgkckdglgeytctclegfegkncelftrklcsldngdcdq
fcheeqnsvvcscargytladngkaciptgpypcgkqtlerrkrSVAQA
TSSSGEAPDSITWKPYDAADLDPTENPFDLLDFNQTQPER [symbol]
EGFCGGTILSEFYI
LTAAHCLYQAKRFKVRVGDRNTEQEEGGEAVHEVEVVIKHNRFTKETYD
FDIAVLRLKTPITFRMNVAPACLPERDWAESTLMTQKTGIVSGFGRTHE
KGRQSTRLKMLEVPYVDRNSCKLSSSFIITQNMFCAGYDTKQEDACQGD
SGGPHVTRFKDTYFVTGIVSWGEGCARKGKYGIYTKVTAFLKWIDRSMK
TRGLPKAKSHAPEVITSSPLK
SEQ ID NO: 64
ansfleemkkghlerecmeetcsyeearevfedsdktnefwnkykdgdq
cetspcqnqgkckdglgeytctclegfegkncelftrklcsldngdcdq
fcheeqnsvvcscargytladngkaciptgpypcgkqtlerrkrSVAQA
TSSSGEAPDSITWKPYDAADLDPTENPFDLLDFNQTQPER [symbol]
EGFCGGTILSEFYI
LTAAHCLYQAKRFKVRVGDRNTEQEEGGEAVHEVEVVIKHNRFTKETYD
FDIAVLRLKTPITFRMNVAPACLPERDWAESTLMTQKTGIVSGFGRTHE
KGRQSTRLKMLEVPYVDRNSCKLSSSFIITQNMFCAGYDTKQEDACQGD
SGGPHVTRFKDTYFVTGIVSWGEGCARKGKYGIYTKVTAFLKWIDRSMK
TRGLPKAKSHAPEVITSSPLK
SEQ ID NO: 72
ansfleemkkghlerecmeetcsyeearevfedsdktnefwnkykdgdq
cetspcqnqgkckdglgeytctclegfegkncelftrklcsldngdcdq
fcheeqnsvvcscargytladngkaciptgpypcgkqtlerrkrSVAQA
TSSSGEAPDSITWKPYDAADLDPTENPFDLLDFNQTQPER [symbol]
EGFCGGTILSEFYI
LTAAHCLYQAKRFKVRVGDRNTEQEEGGEAVHEVEVVIKHNRFTKETYD
FDIAVLRLKTPITFRMNVAPACLPERDWAESTLMTQKTGIVSGFGRTHE
KGRQSTRLKMLEVPYVDRNSCKLSSSFIITQNMFCAGYDTKQEDACQGD
SGGPHVTRFKDTYFVTGIVSWGEGCARKGKYGIYTKVTAFLKWIDRSMK
TRGLPKAKSHAPEVITSSPLK
SEQ ID NO: 76
ansfleemkkghlerecmeetcsyeearevfedsdktnefwnkykdgdq
cetspcqnqgkckdglgeytctclegfegkncelftrklcsldngdcdq
fcheeqnsvvcscargytladngkaciptgpypcgkqtlerrkrSVAQA
TSSSGEAPDSITWKPYDAADLDPTENPFDLLDFNQTQPER [symbol]
GFCGGTILSEFYI
LTAAHCLYQAKRFKVRVGDRNTEQEEGGEAVHEVEVVIKHNRFTKETYD
FDIAVLRLKTPITFRMNVAPACLPERDWAESTLMTQKTGIVSGFGRTHE
KGRQSTRLKMLEVPYVDRNSCKLSSSFIITQNMFCAGYDTKQEDACQGD
SGGPHVTRFKDTYFVTGIVSWGEGCARKGKYGIYTKVTAFLKWIDRSMK
TRGLPKAKSHAPEVITSSPLK
SEQ ID NO: 108
ansfleemkkghlerecmeetcsyeearevfedsdktnefwnkykdgdq
cetspcqnqgkckdglgeytctclegfegkncelftrklcsldngdcdq
fcheeqnsvvcscargytladngkaciptgpypcgkqtlerrkrSVAQA
TSSSGEAPDSITWKPYDAADLDPTENPFDLLDFNQTQ [symbol]
ENEGFCGGTILSEFYI
LTAAHCLYQAKRFKVRVGDRNTEQEEGGEAVHEVEVVIKHNRFTKETYD
FDIAVLRLKTPITFRMNVAPACLPERDWAESTLMTQKTGIVSGFGRTHE
KGRQSTRLKMLEVPYVDRNSCKLSSSFIITQNMFCAGYDTKQEDACQGD
SGGPHVTRFKDTYFVTGIVSWGEGCARKGKYGIYTKVTAFLKWIDRSMK
TRGLPKAKSHAPEVITSSPLK
SEQ ID NO: 112
ansfleemkkghlerecmeetcsyeearevfedsdktnefwnkykdgdq
cetspcqnqgkckdglgeytctclegfegkncelftrklcsldngdcdq
fcheeqnsvvcscargytladngkaciptgpypcgkqtlerrkrSVAQA
TSSSGEAPDSITWKPYDAADLDPTENPFDLLDFNQTQ [symbol]
ENEGFCGGTILSEFYI
LTAAHCLYQAKRFKVRVGDRNTEQEEGGEAVHEVEVVIKHNRFTKETYD
FDIAVLRLKTPITFRMNVAPACLPERDWAESTLMTQKTGIVSGFGRTHE
KGRQSTRLKMLEVPYVDRNSCKLSSSFIITQNMFCAGYDTKQEDACQGD
SGGPHVTRFKDTYFVTGIVSWGEGCARKGKYGIYTKVTAFLKWIDRSMK
TRGLPKAKSHAPEVITSSPLK
SEQ ID NO: 116
ansfleemkkghlerecmeetcsyeearevfedsdktnefwnkykdgdq
cetspcqnqgkckdglgeytctclegfegkncelftrklcsldngdcdq
fcheeqnsvvcscargytladngkaciptgpypcgkqtlerrkrSVAQA
TSSSGEAPDSITWKPYDAADLDPTENPFDLLDFNQTQ [symbol]
ENEGFCGGTILSEFYI
LTAAHCLYQAKRFKVRVGDRNTEQEEGGEAVHEVEVVIKHNRFTKETYD
FDIAVLRLKTPITFRMNVAPACLPERDWAESTLMTQKTGIVSGFGRTHE
KGRQSTRLKMLEVPYVDRNSCKLSSSFIITQNMFCAGYDTKQEDACQGD
SGGPHVTRFKDTYFVTGIVSWGEGCARKGKYGIYTKVTAFLKWIDRSMK
TRGLPKAKSHAPEVITSSPLK

[0060] The term “haemophilia”/“coagulopathy”/“blood clotting disease”, as used herein, refers to an increased haemorrhagic tendency which may be caused by any qualitative or quantitative deficiency of any pro-coagulative component of the normal coagulation cascade, or any upregulation of fibrinolysis. Such coagulopathies may be congenital and/or acquired and/or iatrogenic.

[0061] Non-limiting examples of congenital hypocoagulopathies are haemophilia A, haemophilia B, Factor VII deficiency, Factor X deficiency, Factor XI deficiency, von Willebrand's disease and thrombocytopenias such as Glanzmann's thrombasthenia and Bernard-Soulier syndrome. Said haemophilia A or B may be severe, moderate or mild. The clinical severity of haemophilia is determined by the concentration of functional units of FIX/FVIII in the blood and is classified as mild, moderate, or severe. Severe haemophilia is defined by a clotting factor level of <0.01 U/ml corresponding to <1% of the normal level, while moderate and mild patients have levels from 1-5% and >5%, respectively. Haemophilia A with “inhibitors” (that is, allo-antibodies against Factor VIII) and haemophilia B with “inhibitors” (that is, allo-antibodies against Factor IX) are non-limiting examples of coagulopathies that are partly congenital and partly acquired.

[0062] In one embodiment of the current invention, haemorrhage is associated with haemophilia A or B. In another embodiment, haemorrhage is associated with haemophilia A or B with acquired inhibitors. In another embodiment, haemorrhage is associated with thrombocytopenia. In another embodiment, haemorrhage is associated with von Willebrand's disease. In another embodiment, haemorrhage is associated with severe tissue damage. In another embodiment, haemorrhage is associated with severe trauma. In another embodiment, haemorrhage is associated with surgery. In another embodiment, haemorrhage is associated with haemorrhagic gastritis and/or enteritis. In another embodiment, the haemorrhage is profuse uterine bleeding, such as in placental abruption. In another embodiment, haemorrhage occurs in organs with a limited possibility for mechanical haemostasis, such as intra-cranially, intra-aurally or intraocularly. In another embodiment, haemorrhage is associated with anticoagulant therapy.

[0063] The term “treatment”, as used herein, refers to the medical therapy of any human or other vertebrate subject in need thereof. Said treatment may be prophylactic and/or therapeutic.

[0064] “Mode of administration”: Compounds according to the invention may be administered parenterally, e.g. intravenously, intramuscularly, subcutaneously, or intradermally. Compounds according to the invention may be administered prophylactically and/or therapeutically (on demand).

[0065] Compounds according to the invention may be co-administered with one or more other therapeutic agents or formulations. The other agent may be an agent that enhances the effects of the compounds of the invention. The other agent may be intended to treat other symptoms or conditions of the patient. For example, the other agent may be an analgesic, other types of coagulation factors or compounds modulating haemostasis and/or fibrinolysis.

[0066] The compounds according to the invention may be produced by means of recombinant nucleic acid techniques. In general, a DNA sequence encoding a molecule according to the invention is inserted into an expression vector, which is in turn transformed or transfected (transiently or stably) into host cells. The host cell (e.g. a yeast cell, an insect cell or a mammalian cell) is subsequently incubated under conditions suitable for expressing the molecule. The Factor X molecule can subsequently be isolated.

[0067] The invention also relates to polynucleotides that encode Factor X molecules of the invention. Thus, a polynucleotide of the invention may encode any Factor X molecule as described herein. The terms “nucleic acid molecule” and “polynucleotide” are used interchangeably herein and refer to a polymeric form of nucleotides of any length, either deoxyribonucleotides or ribonucleotides, or analogues thereof. Non-limiting examples of polynucleotides include a gene, a gene fragment, messenger RNA (mRNA), cDNA, recombinant polynucleotides, plasmids, vectors, isolated DNA of any sequence, isolated RNA of any sequence, nucleic acid probes, and primers. A polynucleotide of the invention may be provided in isolated or purified form.

[0068] A nucleic acid sequence which “encodes” a selected polypeptide is a nucleic acid molecule which is transcribed (in the case of DNA) and translated (in the case of mRNA) into a polypeptide in vivo when placed under the control of appropriate regulatory sequences. The boundaries of the coding sequence are determined by a start codon at the 5′ (amino) terminus and a translation stop codon at the 3′ (carboxy) terminus. For the purposes of the invention, such nucleic acid sequences can include, but are not limited to, cDNA from viral, prokaryotic or eukaryotic mRNA, genomic sequences from viral or prokaryotic DNA or RNA, and even synthetic DNA sequences. A transcription termination sequence may be located 3′ to the coding sequence.

[0069] A polynucleotide of the invention may encode a polypeptide comprising the sequence of inter alia SEQ ID NOs: 3, 8, 108, 112, 120, 160 or a variant or fragment thereof. Such a polynucleotide may consist of or comprise a nucleic acid sequence of any one of SEQ ID NOs: 4, 7, 107, 111, 119 or 159. A suitable polynucleotide sequence may alternatively be a variant of one of these specific polynucleotide sequences. For example, a variant may be a substitution, deletion or addition variant of any of the above nucleic acid sequences.

[0070] In another aspect, the present invention provides pharmaceutical compositions/formulations comprising Factor X molecules according to the invention. For example, the invention provides pharmaceutical compositions formulated together with one or more pharmaceutically acceptable carrier (e.g. the use of preservatives, isotonic agents, chelating agents, stabilizers and surfactants in pharmaceutical compositions is well-known to the skilled person). Preferably, the pharmaceutical formulation is a freeze-dried formulation, to which the physician or the patient adds solvents and/or diluents prior to use. In a further aspect, the pharmaceutical formulation comprises an aqueous solution and a buffer, wherein the coagulation factor is present in a concentration from 1 mg/ml or above, and wherein said formulation has a pH from about 6.0 to about 8.0, such as e.g. about 6.0, 6.1, 6.2, 6.3, 6.3, 6.4, 6.5, 6.5, 6.6, 6.7, 6.8, 6.7, 6.8, 6.9, 7.0, 7.1, 7.2, 7.3, 7.4, 7.5, 7.6, 7.7, 7.8, 7.8, 7, 9, or 8.0.

[0071] “FX derivative” according to the present invention, is intended to designate Factor X molecules according to the invention exhibiting substantially the same or improved biological activity relative to wild type Factor X, in which one or more of the amino acids have been chemically modified, e.g. by alkylation, PEGylation, acylation, ester formation or amide formation or the like.

[0072] The term “protractive groups”/“half-life extending moieties” is herein understood to refer to one or more chemical groups attached to one or more Factor X amino acid side chain functionalities such as —SH, —OH, —COOH, —CONH₂, —NH₂, or one or more N- and/or O-glycan structures. Said half-life extending moieties can increase in vivo circulatory half-life of a number of therapeutic proteins/peptides when conjugated to these proteins/peptides. Examples of protractive groups/half-life extending moieties include: Biocompatible fatty acids and derivatives thereof, polysaccarides (e.g. Hydroxy Alkyl Starch (HAS) e.g. Hydroxy Ethyl Starch (HES), Hyaluronic acid (HA), Dextran, Poly-sialic acids (PSA) and Heparosan polymers (HEP)), Poly Ethylene Glycol (PEG), Poly (Glyₓ-Ser_{y})ₙ (HAP), Phosphorylcholine-based polymers (PC polymer), Fleximers, polypeptides (e.g. Fc domains, Transferrin, Albumin, Elastin like peptides, XTEN polymers, Albumin binding peptides, and CTP peptides), and any combination thereof.

[0073] “PEGylated coagulation factors” according to the present invention may have one or more polyethylene glycol (PEG) molecules attached to any part of the protein, including any amino acid residue or carbohydrate moiety. Chemical and/or enzymatic methods can be employed for conjugating PEG (or other half-life extending moieties) to a glycan on the protein according to the invention. An example of an enzymatic conjugation process is described e.g. in WO03031464, which is hereby incorporated by reference in its entirety.

[0074] The glycan may be naturally occurring or it may be inserted via e.g. insertion of an N-linked glycan using recombinant methods well known in the art. According to a preferred embodiment, Factor X molecules/derivatives according to the invention are conjugated with half-life extending moieties at one or more of the glycans present in the activation peptide, in which case said half-life extending moieties are removed upon activation of the molecule.

[0075] “HEPylated coagulation factors” according to the present invention may a heparosan (HEP) polymer attached to any part of the protein, including any amino acid residue or carbohydrate moiety.

[0076] “Cysteine-conjugated (e.g. acylated/pegylated, etc.) coagulation factors molecules/derivatives” according to the present invention have one or more half-life extending moieties conjugated to a sulfhydryl group of a cysteine that is present or is introduced in the protein. It is, furthermore, possible to link protractive half-life extending moieties to other amino acid residues.

[0077] “Cysteine-PEGylated coagulation factors” according to the present invention have one or more PEG molecules conjugated to a sulfhydryl group of a cysteine present or introduced in the protein.

[0078] “Cysteine-HEPylated coagulation factors” according to the present invention have one or more HEP molecules conjugated to a sulfhydryl group of a cysteine present or introduced in the protein.

[0079] “Heparosan” (HEP) is a natural sugar polymer comprising (-GlcUA-1,4-GlcNAc-1,4-) repeats. It belongs to the glycosaminoglycan polysaccharide family and is a negatively charged polymer at physiological pH. It can be found in the capsule of certain bacteria but it is also found in higher vertebrate where it serves as precursor for the natural polymers heparin and heparan sulphate. HEP can be degraded by lysosomal enzymes such as N-acetyl-a-D-glucosaminidase (NAGLU) and β-glucuronidase (GUSB). A heparosan polymer for use in the present invention is typically a polymer of the formula (-GlcUA-beta1,4-GlcNAc-alpha1,4-)ₙ. The size of the HEP polymer may be defined by the number of repeats n. The number of said repeats n may be, for example, from 2 to about 5,000. The number of repeats may be, for example 50 to 2,000 units, 100 to 1,000 units, 5 to 450 or 200 to 700 units. The number of repeats may be 200 to 250 units, 500 to 550 units or 350 to 400 units. Any of the lower limits of these ranges may be combined with any higher upper limit of these ranges to form a suitable range of numbers of units in the HEP polymer.

[0080] The size of the HEP polymer may also be defined by its molecular weight. The molecular weight may be the average molecular weight for a population of HEP polymer molecules, such as the weight average molecular mass. Molecular weight values as described herein in relation to size of the HEP polymer may not, in practise, exactly be the size listed. Due to batch to batch variation during HEP polymer production, some variation is to be expected. To encompass batch to batch variation, it is therefore to be understood, that a variation around +/−10%, 9%, 8%, 7%, 6%, 5%, 4%, 3%, 2% or 1% around target HEP polymer size could to be expected. For example, a HEP polymer size of 40 kDa denotes 40 kDa+/−10%, e.g. 40 kDa could for example in practise mean 38.8 kDa or 41.5 kDa.

[0081] The HEP polymer may have a molecular weight of, for example, 500 Da to 1,000 kDa. The molecular weight of the polymer may be 500 Da to 650 kDa, 5 to 750 kDa, 10 to 500 kDa, 15 to 550 kDa, 25 to 250 kDa or 50 to 175 kDa.

[0082] For the purposes of the present invention the molecular weight may be selected at particular levels within these ranges in order to achieve a suitable balance between activity of the Factor X molecule and half-life of the conjugate. For example, the molecular weight of the HEP polymer may be in a range selected from 5 to 15 kDa, 15 to 25 kDa, 25 to 35 kDa, 35 to 45 kDa, 45 to 55 kDa, 55 to 65 kDa, 65 to 75 kDa, 75 to 85 kDa, 85 to 95 kDa, 95 to 105 kDa, 105 to 115 kDa, 115 to 125 kDa, 125 to 135 kDa, 135 to 145 kDa, 145 to 155 kDa, 155 to 165 kDa or 165 to 175 kDa. In other embodiments, the molecular weight may be 500 Da to 21 kDa, such as 1 kDa to 15 kDa, such as 5 to 15 kDa, such as 8 to 17 kDa, such as 10 to 14 kDa such as about 12 kDa. The molecular weight may be 20 to 35 kDa, such as 22 to 32 kDa such as 25 to 30 kDa, such as about 27 kDa. The molecular weight may be 35 to 65 kDa, such as 40 to 60 kDa, such as 47 to 57 kDa, such as 50 to 55 kDa such as about 52 kDa. The molecular weight may be 50 to 75 kDa such as 60 to 70 kDa, such as 63 to 67 kDa such as about 65 kDa. The molecular weight may be 75 to 125 kDa, such as 90 to 120 kDa, such as 95 to 115 kDa, such as 100 to 112 kDa, such as 106 to 110 kDa such as about 108 kDa. The molecular weight may be 125 to 175 kDa, such as 140 to 165 kDa, such as 150 to 165 kDa, such as 155 to 160 kDa such as about 157 kDa. The molecular weight may be 5 to 100 kDa, such as 13 to 60 kDa and such as 27 to 40 kDa.

[0083] In particularly interesting embodiments, the HEP polymer conjugated to the FX molecule has a size in a range selected from 13 to 65 kDa, 13 to 55 kDa, 13 to 50 kDa, 13 to 49 kDa, 13 to 48 kDa, 13 to 47 kDa, 13 to 46 kDa, 13 to 45 kDa, 13 to 44 kDa, 13 to 43 kDa, 13 to 42 kDa, 13 to 41 kDa, 13 to 40 kDa, 13 to 39 kDa, 13 to 38 kDa, 13 to 37 kDa, 13 to 36 kDa, 13 to 35 kDa, 13 to 34 kDa, 13 to 33 kDa, 13 to 33 kDa, 13 to 32 kDa, 13 to 31 kDa, 13 to 30 kDa, 13 to 29 kDa, 13 to 28 kDa, 13 to 27 kDa, 13 to 26 kDa, 13 to 25 kDa, 13 to 21 kDa, 25 to 55 kDa, 25 to 50 kDa, 25 to 45 kDa, 27 to 40 kDa, 27 to 41 kDa, 27 to 42 kDa, 27 to 43 kDa, 27 to 43 kDa, 27 to 44 kDa, 30 to 45 kDa and 38 to 42 kDa.

[0084] Any of the lower limits of these ranges of molecular weight may be combined with any higher upper limit from these ranges to form a suitable range for the molecular weight of the HEP polymer in accordance with the invention.

[0085] In connection with FX conjugates as described herein, use of HEP in the side chain offers a very flexible way of prolonging in vivo circulation half-life since a range of HEP sizes result in a significantly improved half-life.

[0086] The HEP polymer may have a narrow size distribution (i.e. monodisperse) or a broad size distribution (i.e. polydisperse). The level of polydispersity may be represented numerically based on the formula Mw/Mn, where Mw=weight average molecular mass and Mn=number average molecular weight. The polydispersity value using this equation for an ideal monodisperse polymer is 1. Preferably, a HEP polymer for use in the present invention is monodisperse. The polymer may therefore have a polydispersity that is about 1, the polydispersity may be less than 1.25, preferably less than 1.20, preferably less than 1.15, preferably less than 1.10, preferably less than 1.09, preferably less than 1.08, preferably less than 1.07, preferably less than 1.06, preferably less than 1.05. The molecular weight size distribution of the HEP may be measured by comparison with monodisperse size standards (HA Lo-Ladder, Hyalose LLC) which may be run on agarose gels.

Alternatively, the size distribution of HEP polymers may be determined by high performance size exclusion chromatography-multi angle laser light scattering (SEC-MALLS). Such a method can be used to assess the molecular weight and polydispersity of a HEP polymer. Polymer size may be regulated in enzymatic methods of production. By controlling the molar ratio of HEP acceptor chains to UDP sugar, it is possible to select a final HEP polymer size that is desired.

[0087] HEP polymers can be prepared by a synchronised enzymatic polymerisation reaction (US 20100036001). This method use heparan synthetase I from Pasturella multocida (PmHS1) which can be expressed in E. coli as a maltose binding protein fusion constructs. Purified MBP-PmHS1 is able to produce monodisperse polymers in a synchronized, stoichiometrically controlled reaction, when it is added to an equimolar mixture of sugar nucleotides (GlcNAc-UDP and GlcUA-UDP). A trisaccharide initiator (GlcUA-GlcNAc-GlcUA) is used to prime the reaction, and polymer length is determined by the primer:sugar nucleotide ratios. The polymerization reaction will run until about 90% of the sugar nucleotides are consumed. Polymers are isolated from the reaction mixture by anion exchange chromatography, and subsequently freeze-dried into stable powder.

[0088] According to the present invention, a Factor X molecule as described herein is conjugated to a HEP polymer as described herein. Any Factor X molecule as described herein may be combined with any HEP polymer as described herein. Common methods for linking half-life extending moieties such as carbohydrate polymers to glycoproteins comprise oxime, hydrazone or hydrazide bond formation. WO2006094810 describes methods for attaching hydroxyethyl starch polymers to glycoproteins such as erythropoietin that circumvent the problems connected to using activated ester chemistry. In these methods, hydroxyethyl starch and erythropoietin are individually oxidized with periodate on the carbohydrate moieties, and the reactive carbonyl groups ligated together using bis-hydroxylamine linking agents. The method will create hydroxyethyl starch linked to the erythropoietin via oxime bonds. Similar oxime based linking methodology can be imagined for attaching carbohydrate polymers to GSC (cf. WO2011101267), however, as such oxime bonds are known to exist in both syn- and anti-isomer forms, the linkage between the polymer and the protein will contain both syn- and anti-isomer combinations. Such isomer mixtures are usually not desirable in proteinaceous medicaments that are used for long term repeating administration since the linker inhomogeneity may pose a risk for antibody generation.

[0089] The above mentioned methods have further disadvantages. In the oxidative process required for activating the glycoprotein, parts of the carbohydrate residues are chemically cleaved and the carbohydrates will therefore not present in intact form in the final conjugate. The oxidative process will, furthermore, generate product heterogenicity as the oxidating agent i.e. periodate in most cases is unspecific with regard to which glycan residue is oxidized. Both product heterogenecity and the presence of non-intact glycan residues in the final drug conjugate may impose immunogenicity risks.

[0090] Alternatives for linking carbohydrate polymers to glycoproteins involve the use of maleimide chemistry (WO2006094810). For example, the carbohydrate polymer can be furnished with a maleimido group, which selectively can react with a sulfhydryl group on the target protein. The linkage will then contain a cyclic succinimide group.

In connection with the present invention, it is shown that it is possible to link a carbohydrate polymer such as HEP via a maleimido group to a thio-modified GSC molecule and transfer the reagent to an intact glycosyl groups on a glycoprotein by means of a sialyltransferase, thereby creating a linkage that contains a cyclic succinimide group. Succinimide based linkages, however, may undergo hydrolytic ring opening when the conjugate is stored in aqueous solution for extended time periods (Bioconjugation Techniques, G. T. Hermanson, Academic Press, 3^{rd} edition 2013 p. 309) and while the linkage may remain intact, the ring opening reaction will add undesirable heterogeneity in form of regio- and stereo-isomers to the final conjugate.

[0091] It follows from the above that it is preferable to link the half-life extending moiety to the glycoprotein in such a way that 1) the glycan residue of the glycoprotein is preserved in intact form, and 2) no heterogeneity is present in the linker part between the intact glycosyl residue and the half-life extending moiety.

[0092] There is a need in the art for methods of conjugating a half-life extending moiety such as HEP to a protein glycan such as a Factor X glycan, wherein the compounds are linked such that a stable and isomer free conjugate is obtained.

[0093] In one aspect the present invention provides a stable and isomer free linker for use in glycyl sialic acid cytidine monophosphate (GSC) based conjugation of HEP to Factor X. The GSC starting material used in the current invention can be synthesised chemically (Dufner, G. Eur. J. Org. Chem. 2000, 1467-1482) or it can be obtained by chemoenzymatic routes as described in WO07056191. The GSC structure is shown below:

[chemical structure]

In one embodiment conjugates according to the present invention comprise a linker comprising the following structure:

[chemical structure]

hereinafter also referred to as sublinker or sublinkage—that connects a HEP-amine and GSC in one of the following ways:

[chemical structure]

[0094] The highlighted 4-methylbenzoyl sublinker thus makes up part of the full linking structure linking the half-life extending moiety to a target protein. The sublinker is as such a stable structure compared to alternatives, such as succinimide based linkers (prepared from maleimide reactions with sulfhydryl groups) since the latter type of cyclic linkage has a tendency to undergo hydrolytic ring opening when the conjugate is stored in aqueous solution for extended time periods (Bioconjugation Techniques, G. T. Hermanson, Academic Press, 3^{rd} edition 2013 p. 309). Even though the linkage in this case (e.g. between HEP and sialic acid on a glycoprotein) may remain intact, the ring opening reaction will add heterogeneity in form of regio- and stereo-isomers to the final conjugate composition. One advantage associated with conjugates according to the present invention is thus that a homogenous composition is obtained, i.e. that the tendency of isomer formation due to linker structure and stability is significantly reduced. Another advantage is that the linker and conjugates according to the invention can be produced in a simple process, preferably a one-step process.

[0095] Isomers are undesirable since these can lead to a heterogeneous product and increase the risk for unwanted immune responses in humans. The 4-methylbenzoyl sublinkage as used in the present invention between HEP and GSC is not able to form steno- or regio isomers.

[0096] Processes for preparation of functional HEP polymers are described in US 20100036001 that for example lists aldehyde-, amine- and maleimide functionalized HEP reagents. US 20100036001 is hereby incorporated by reference in its entirety as if fully set forth herein. A range of other functionally modified HEP derivatives are available using similar chemistry. HEP polymers used in certain embodiments of the present invention are initially produced with a primary amine handle at the reducing terminal according to methods described in US20100036001.

[0097] Amine functionalized HEP polymers (i.e. HEP having an amine-handle) prepared according US20100036001 can be converted into a HEP-benzaldehyde by reaction with N-succinimidyl 4-formylbenzoate and subsequently coupled to the glycylamino group of GSC by a reductive amination reaction. The resulting HEP-GSC product can subsequently be enzymatically conjugated to a glycoprotein using a sialyltransferase.

[0098] For example said amine handle on HEP can be converted into a benzaldehyde functionality by reaction with N-succinimidyl 4-formylbenzoate according to the below scheme:

[chemical structure]

[0099] The conversion of HEP amine (1) to the 4-formylbenzamide compound (2) in the above scheme may be carried out by reaction with acyl activated forms of 4-formylbenzoic acid.

N-succinimidyl may be chosen as acyl activating group but a number of other acyl activation groups are known to the skilled person. Non-limited examples include 1-hydroxy-7-azabenzotriazole-, 1-hydroxy-benzotriazole-, pentafluorophenyl-esters as know from peptide chemistry.

[0100] HEP reagents modified with a benzaldehyde functionality can be kept stable for extended time periods when stored frozen (−80° C.) in dry form. Alternatively, a benzaldehyde moiety can be attached to the GSC compound, thereby resulting in a GSC-benzaldehyde compound suitable for conjugation to an amine functionalized HEP moiety. This route of synthesis is depicted in FIG. 2.

For example, GSC can be reacted under pH neutral conditions with N-succinimidyl 4-formylbenzoate to provide a GSC compound that contains a reactive aldehyde group. The aldehyde derivatized GSC compound (GSC-benzaldehyde) can then be reacted with HEP-amine and reducing agent to form a HEP-GSC reagent.

[0101] The above mentioned reaction may be reversed, so that the HEP-amine is first reacted with N-succinimidyl 4-formylbenzoate to form an aldehyde derivatized HEP-polymer, which subsequently is reacted directly with GSC in the presence of a reducing agent. In practice this eliminates the tedious chromatographic handling of GSC-CHO. This route of synthesis is depicted in FIG. 3. Thus, in one embodiment of the present invention HEP-benzaldehyde is coupled to GSC by reductive amination.

[0102] Reductive amination is a two-step reaction which proceeds as follows: Initially an imine (also known as Schiff-base) is formed between the aldehyde component and the amine component (in the present embodiment the glycyl amino group of GSC). The imine is then reduced to an amine in the second step. The reducing agent is chosen so that it selectively reduces the formed imine to an amine derivative.

[0103] A number of suitable reducing reagents are available to the skilled person. Non-limiting examples include sodium cyanoborohydride (NaBH3CN), sodium borohydride (NaBH4), pyridin boran complex (BH3:Py), dimethylsulfide boran complex (Me2S:BH3) and picoline boran complex.

[0104] Although reductive amination to the reducing end of carbohydrates (for example to the reducing termini of HEP polymers) is possible, it has generally been described as a slow and inefficient reaction (J C. Gildersleeve, Bioconjug Chem. 2008 July; 19(7): 1485-1490). Side reactions, such as the Amadori reaction, where the initially formed imine rearrange to a keto amine are also possible, and will lead to heterogeneity which as previously discussed is undesirable in the present context.

[0105] Aromatic aldehydes such as benzaldehydes derivatives are not able to form such rearrangement reactions as the imine is unable to enolize and also lack the required neighbouring hydroxy group typically found in carbohydrate derived imines. Aromatic aldehydes such as benzaldehydes derivatives are therefore particular useful in reductive amination reactions for generating the isomer free HEP-GSC reagent.

[0106] A surplus of GSC and reducing reagent is optionally used in order to drive reductive amination chemistry fast to completion. When the reaction is completed, the excess (non-reacted) GSC reagent and other small molecular components such as excess reducing reagent can subsequently be removed by dialysis, tangential flow filtration or size exclusion chromatography.

[0107] Both the natural substrate for sialyltransferases, Sia-CMP, and the GSC derivatives are multifunctional molecules that are charged and highly hydrophilic. In addition, they are not stable in solution for extended time periods especially if pH is below 6.0. At such low pH, the CMP activation group necessary for substrate transfer is lost due to acid catalyzed phosphate diester hydrolysis. Selective modification and isolation of GSC and Sia-CMP derivatives thus require careful control of pH, as well as fast and efficient isolation methods, in order to avoid CMP-hydrolysis.

[0108] In one aspect of the present invention, large half-life extending moieties are conjugated to GSC using reductive amination chemistry. Arylaldehydes, such as benzaldehyde modified HEP polymers have been found optimal for this type of modification, as they can efficiently react with GSC under reductive amination conditions.

[0109] As GSC may undergo hydrolysis in acid media, it is important to maintain a near neutral or slightly basic environment during the coupling to HEP-benzaldehyde. HEP polymers and GSC are both highly water soluble and aqueous buffer systems are therefore preferable for maintaining pH at a near neutral level. A number of both organic and inorganic buffers may be used; however, the buffer components should preferably not be reactive under reductive amination conditions. This excludes for instance organic buffer systems containing primary and—to lesser extend—secondary amino groups. The skilled person will know which buffers are suitable and which are not. Some examples of suitable buffers are include Bicine (N,N-bis(2-hydroxyethyl)glycine), HEPES (4-2-hydroxyethyl-1-piperazineethanesulfonic acid), TES (2-{[tris(hydroxymethyl)methyl]amino}ethanesulfonic acid), MOPS (3-(N-morpholino)propanesulfonic acid), PIPES (Piperazine-N,N′-bis(2-ethanesulfonic acid)) and MES (2-(N-morpholino)ethanesulfonic acid).

[0110] By applying this method, GSC reagents modified with half-life extending moieties such as HEP, having isomer free stable linkages can efficient be prepared, and isolated in a simple process that minimize the chance for hydrolysis of the CMP activation group. By reacting either of said compounds with each other a HEP-GSC conjugate comprising a 4-methylbenzoyl sublinker moiety may be created.

[0111] GSC may also be reacted with thiobutyrolactone, thereby creating a thiol modified GSC molecule (GSC-SH). Such reagents may be reacted with maleimide functionalized HEP polymers to form HEP-GSC reagents. This synthesis route is depicted in FIG. 4. The resulting product has a linkage structure comprising succinimide.

[chemical structure]

[0112] However, succinimide based (sub)linkages may undergo hydrolytic ring opening inter alia when the modified GSC reagent is stored in aqueous solution for extended time periods and while the linkage may remain intact, the ring opening reaction will add undesirable heterogeneity in form of regio- and stereo-isomers.

### Methods of Glycoconjugation

[0113] Conjugation of a HEP-GSC conjugate with a polypeptide may be carried out via a glycan present on residues in the polypeptide backbone. This form of conjugation is also referred to as glycoconjugation.

In contrast to conjugation methods based on cysteine alkylations, lysine acylations and similar conjugations involving amino acids in the protein backbone, conjugation via glycans is an appealing way of attaching larger structures such as a HEP polymer to bioactive proteins with less disturbance of bioactivity. This is because glycans being highly hydrophilic generally tend to be oriented away from the protein surface and out in solution, leaving the binding surfaces that are important for the proteins activity free. The glycan may be naturally occurring or it may be inserted via e.g. insertion of an N-linked glycan using methods well known in the art.

[0114] Methods for glycoconjugation of HEP polymers include galactose oxidase based conjugation (WO2005014035) and periodate based conjugation (WO08025856). Methods based on sialyltransferase have over the years proven to be mild and highly selective for modifying N-glycans or O-glcyans on blood coagulation factors, such as Factor X.

[0115] GSC is a sialic acid derivative that can be transferred to glycoproteins by the use of sialyltransferases. It can be selectively modified with substituents such as PEG or HEP on the glycyl amino group and still be enzymatically transferred to glycoproteins by use of sialyltransferases. GSC can be efficiently prepared by an enzymatic process in large scale (WO07056191).

[0116] In one aspect of the present invention, terminal sialic acids on Factor X glycans can be removed by sialidase treatment to provide asialoFX. AsialoFX and GSC modified with HEP together will act as substrates for sialyltransferases. The product of the sialyltransferase reaction is a HEP-FX conjugate having HEP linked via an intact glycosyl linking group on the glycan.

### Sialyltransferases

[0117] Sialyltransferases are a class of glycosyltransferases that transfer sialic acid from naturally activated sialic acid (Sia)-CMP (cytidine monophosphate) compounds to galactosyl-moieties on e.g. proteins. Many sialyltransferases (ST3GaIIII, ST3GaII, ST6GaINAcI) are capable of transfer of sialic acid-CMP (Sia-CMP) derivatives that have been modified on the C5 acetamido group inter alia with large groups such as 40 kDa PEG (WO03031464). An extensive, but non-limited list of relevant sialyltransferases that can be used with the current invention is disclosed in WO2006094810, which is hereby incorporated by reference in its entirety.

[0118] In one aspect of the present invention, terminal sialic acids on glycoproteins can be removed by sialidase treatment to provide asialo glycoproteins. Asialo glycoproteins and GSC modified with the half-life extending moiety together will act as substrates for sialyltransferases. The product of the reaction is a glycoprotein conjugate having the half-life extending moiety linked via an intact glycosyl linking group—in this case an intact sialic acid linker group.

### Properties of HEP-FX Conjugates

[0119] A conjugate of the invention may show various advantageous biological properties. For example, the conjugate may show one of more of the following non-limiting advantages when compared to a suitable control Factor X molecule: improved circulation half-life in vivo, improved mean residence time in vivo and improved biodegradability in vivo.

[0120] Advantages may be seen when a conjugate of the invention is compared to a suitable control Factor X molecule. The control molecule may be, for example, an unconjugated Factor X molecule. The conjugated control may be a Factor X molecule conjugated to a water soluble polymer, or a Factor X molecule chemically linked to a protein. A conjugated Factor X control may be a Factor X polypeptide that is conjugated to a chemical moiety (being protein or water soluble polymer) of a similar size as the HEP molecule in the conjugate of interest. The water-soluble polymer can for example be PEG, branched PEG, dextran, poly(l-hydroxymethylethylene hydroxymethylformal) or 2-methacryloyloxy-2′-ethyltrimethylammoniumphosphate (MPC).

[0121] The Factor X molecule in the control Factor X molecule is preferably the same Factor X molecule that is present in the conjugate of interest. For example, the control Factor X molecule may have the same amino acid sequence as the Factor X polypeptide in the conjugate of interest. The control Factor X may have the same glycosylation pattern as the Factor X polypeptide in the conjugate of interest.

[0122] The presently disclosed conjugates preferably show an improvement in circulatory half-life, or in mean residence time when compared to a suitable control. Conjugates according to the present invention have a modified circulatory half-life compared to the wild type protein molecule, preferably an increased circulatory half-life. Circulatory half-life is preferably increased at least 10%, preferably at least 15%, preferably at least 20%, preferably at least 25%, preferably at least 30%, preferably at least 35%, preferably at least 40%, preferably at least 45%, preferably at least 50%, preferably at least 55%, preferably at least 60%, preferably at least 65%, preferably at least 70%, preferably at least 75%, preferably at least 80%, preferably at least 85%, preferably at least 90%, preferably at least 95%, preferably at least 100%, more preferably at least 125%, more preferably at least 150%, more preferably at least 175%, more preferably at least 200%, and most preferably at least 250% or 300%. Even more preferably, such molecules have a circulatory half-life that is increased at least 400%, 500%, 600%, or even 700%.

[0123] Where the activity being compared is a biological activity of Factor X, such as clotting activity or proteolysis, the control can be a suitable Factor X molecule conjugated to a water soluble polymer of comparable size to the HEP conjugate of the current invention.

[0124] The conjugate may not retain the level of biological activity seen in Factor X that is not modified by the addition of HEP. Preferably the conjugate of the invention retains as much of the biological activity of unconjugated Factor X as possible. For example, the conjugate may retain at least 15%, at least 20%, at least 25%, at least 30%, at least 35%, at least 40%, at least 45%, at least 50%, at least 60%, at least 70%, at least 80% or at least 90% of the biological activity of an unconjugated Factor X control. As discussed above, the control may be a Factor X molecule having the same amino acid sequence as the Factor X molecule in the conjugate, but lacking HEP. The conjugate may, however, show an improvement in biological activity when compared to a suitable control. The biological activity here may be any biological activity of Factor X as described herein such as clotting activity or proteolysis activity.

[0125] An advantage of the conjugates of the invention is that HEP polymers are enzymatically biodegradable. A conjugate of the invention is therefore preferably enzymatically degradable in vivo.

[0126] The term “sialic acid” refers to any member of a family of nine-carbon carboxylated sugars. The most common member of the sialic acid family is N-acetylneuraminic acid (2-keto-5-acetamido-3,5-dideoxy-D-glycero-D-galactononulopyranos-1-onic acid (often abbreviated as Neu5Ac, NeuAc, NeuNAc, or NANA). A second member of the family is N-glycolyl-neuraminic acid (Neu5Gc or NeuGc), in which the N-acetyl group of NeuNAc is hydroxylated. A third sialic acid family member is 2-keto-3-deoxy-nonulosonic acid (KDN) (Nadano et al. (1986) J. Biol. Chem. 261: 11550-11557; Kanamori et al., (1990) J. Biol. Chem. 265: 21811-21819). Also included are 9-substituted sialic acids such as a 9-O-C1-C6 acyl-Neu5Ac like 9-O-lactylNeu5Ac or 9-O-acetyl-Neu5Ac. The synthesis and use of sialic acid compounds in a sialylation procedure is disclosed in international application WO92/16640, published Oct. 1, 1992.

[0127] The term “sialic acid derivative” refers to sialic acids as defined above that are modified with one or more chemical moieties. The modifying group may for example be alkyl groups such as methyl groups, azido- and fluoro groups, or functional groups such as amino or thiol groups that can function as handles for attaching other chemical moieties. Examples include 9-deoxy-9-fluoro-Neu5Ac and 9-azido-9-deoxy-Neu5Ac. The term also encompasses sialic acids that lack one of more functional groups such as the carboxyl group or one or more of the hydroxyl groups. Derivatives where the carboxyl group is replaced with a carboxamide group or an ester group are also encompassed by the term. The term also refers to sialic acids where one or more hydroxyl groups have been oxidized to carbonyl groups. Furthermore the term refers to sialic acids that lack the C9 carbon atom or both the C9-C8 carbon chain for example after oxidative treatment with periodate.

Glycyl sialic acid is a sialic acid derivative according to the definition above, where the N-acetyl group of NeuNAc is replaced with a glycyl group also known as an amino acetyl group. Glycyl sialic acid may be represented with the following structure:

[chemical structure]

[0128] The term “CMP-activated” sialic acid or sialic acid derivatives refer to a sugar nucleotide containing a sialic acid moiety and a cytidine monophosphate (CMP). In the present description, the term “glycyl sialic acid cytidine monophosphate” is used for describing GSC, and is a synonym for alternative naming of same CMP activated glycyl sialic acid. Alternative naming include CMP-5′-glycyl sialic acid, cytidine-5′-monophospho-N-glycylneuraminic acid, cytidine-5′-monophospho-N-glycyl sialic acid. The term “intact glycosyl linking group” refers to a linking group that is derived from a glycosyl moiety in which the saccharide monomer interposed between and covalently attached to the polypeptide and the HEP moiety is not degraded, e.g., oxidized, e.g., by sodium metaperiodate during conjugate formation. “Intact glycosyl linking groups” may be derived from a naturally occurring oligosaccharide by addition of glycosyl unites or removal of one or more glycosyl unit from a parent saccharide structure.

[0129] The term “asialo glycoprotein” is intended to include glycoproteins wherein one or more terminal sialic acid residues have been removed, e.g., by treatment with a sialidase or by chemical treatment, exposing at least one galactose or N-acetylgalactosamine residue from the underlying “layer” of galactose or N-acetylgalactosamine (“exposed galactose residue”).

[0130] Open-ended dotted lines in structure formulas denotes open valence bond (i.e. bonds that connect the structures to other chemical moieties).

[0131] “Fusion proteins” according to the invention are proteins created through the in-frame joining of two or more DNA sequences which originally encode separate proteins or peptides or fragments hereof. Translation of the DNA sequence encoding a fusion protein will result in a protein sequence which may have functional properties derived from each of the original proteins or peptides. DNA sequences encoding fusion proteins may be created artificially by standard molecular biology methods such as overlapping PCR or DNA ligation and the assembly is performed excluding the stop codon in the first 5′-end DNA sequence while retaining the stop codon in the 3′end DNA sequence. The resulting fusion protein DNA sequence may be inserted into an appropriate expression vector that supports the heterologous fusion protein expression in host organisms such as e.g. bacteria, yeast, fungus, insect cells or mammalian cells.

[0132] Fusion proteins may contain a linker or spacer peptide sequence that separates the protein or peptide parts of the fusion protein. The linker or spacer peptide sequence may facilitate the correct folding of the individual protein or peptide parts and may make it more likely for the individual protein or peptide parts to retain their individual functional properties. Linker or spacer peptide sequences may be inserted into fusion protein DNA sequences during the in frame assembly of the individual DNA fragments that make up the complete fusion protein DNA sequence i.e. during overlapping PCR or DNA ligation.

[0133] The term “Fc fusion protein” is herein meant to encompass coagulation factors according to the invention fused to an Fc domain that can be derived from any antibody isotype. An IgG Fc domain will often be preferred due to the relatively long circulatory half-life of IgG antibodies. The Fc domain may furthermore be modified in order to modulate certain effector functions such as e.g. complement binding and/or binding to certain Fc receptors. Fusion with an Fc domain, which has the capacity to bind to FcRn receptors, will generally result in a prolonged circulatory half-life of the fusion protein compared to the half-life of the wild type coagulation factor. Mutations in amino acid positions 234, 235 and 237 in an IgG Fc domain will generally result in reduced binding to the FcγRI receptor and possibly also the FcγRIIa and the FcγRIII receptors. These mutations do not alter binding to the FcRn receptor, which promotes a long circulatory half-life by an endocytic recycling pathway. Preferably, a modified IgG Fc domain of a fusion protein according to the invention comprises one or more of the following mutations that will result in decreased affinity to certain Fc receptors (L234A, L235E, and G237A) and in reduced C1q-mediated complement fixation (A330S and P331S), respectively. Alternatively, the Fc domain may be an IgG4 Fc domain, preferably comprising the S241P/S228P mutation.

### The Following are Non-Limiting Aspects of the Invention

[0134] 1. A thrombin sensitive Factor X molecule comprising 2 to 10 amino acid modifications N-terminally of the “IVGG” motif (amino acids 195 to 198 in SEQ ID NO: 1) in wild type Factor X, said modifications being in any of the positions X₁₀ to X₁:
   [0135] X₁₀, X₉, X₈, X₇, X₆, X₅, X₄, X₃, X₂, X₁, I, V, G, G
   [0136] wherein X₁₀ to X₁ can be any naturally occurring amino acid.
[0137] 2. The thrombin sensitive Factor X molecule according to aspect 1, wherein
   [0138] X₈ is N
   [0139] X₇ is N
   [0140] X₆ is A
   [0141] X₅ is T
   [0142] X₄ is selected from the group consisting of L, I, M, F, V, P or W
   [0143] X₃ is selected from the group consisting of Q, M, R, T, W, K, I, or V
   [0144] X₂ is P, and
   [0145] X₁ is R.
[0146] 3. The thrombin sensitive Factor X molecule according to aspect 1, wherein
   [0147] X₈ is R
   [0148] X₇ is G
   [0149] X₆ is D
   [0150] X₅ is N
   [0151] X₄ is selected from the group consisting of L, I, M, F, V, P or W
   [0152] X₃ is selected from the group consisting of T or S
   [0153] X₂ is P, and
   [0154] X₁ is R.
[0155] 4. The thrombin sensitive Factor X molecule according to aspect 3, wherein X₄ is selected from the list consisting of: F, L, M and W.
[0156] 5. The thrombin sensitive Factor X molecule according to aspect 3, wherein X₃ is T and X₄ is F.
[0157] 6. The thrombin sensitive Factor X molecule according to aspect 3, wherein X₃ is T and X₄ is M.
[0158] 7. The thrombin sensitive Factor X molecule according to aspect 3, wherein X₃ is T and X₄ is W.
[0159] 8. The thrombin sensitive Factor X molecule according to aspect 3, wherein X₃ is T and X₄ is L.
[0160] 9. The thrombin sensitive Factor X molecule according to aspect 1, wherein
   [0161] X₉ is A
   [0162] X₈ is T
   [0163] X₇ is N
   [0164] X₆ is A
   [0165] X₅ is T
   [0166] X₄ is selected from the group consisting of F, L, M, W, A, I, V and P
   [0167] X₃ is selected from the group consisting of T, K, Q, P, S, Y, R, A, V, W, I and H
   [0168] X₂ is P, and
   [0169] X₁ is R.
[0170] 10. The thrombin sensitive Factor X molecule according to aspect 9, wherein X₃ is selected from the list consisting of: T, K and Q.
[0171] 11. The thrombin sensitive Factor X molecule according to aspect 9, wherein X₄ is selected from the list consisting of: F, L and M.
[0172] 12. The thrombin sensitive Factor X molecule according to aspect 9, wherein X₃ is T and X₄ is F.
[0173] 13. The thrombin sensitive Factor X molecule according to aspect 9, wherein X₃ is T and X₄ is M.
[0174] 14. The thrombin sensitive Factor X molecule according to aspect 9, wherein X₃ is T and X₄ is W.
[0175] 15. The thrombin sensitive Factor X molecule according to aspect 9, wherein X₃ is T and X₄ is L.
[0176] 16. The thrombin sensitive Factor X molecule according to aspect 9, wherein X₃ is K and X₄ is L.
[0177] 17. The thrombin sensitive Factor X molecule according to aspect 9, wherein X₃ is K and X₄ is F.
[0178] 18. The thrombin sensitive Factor X molecule according to aspect 9, wherein X₃ is K and X₄ is M.
[0179] 19. The thrombin sensitive Factor X molecule according to aspect 9, wherein X₃ is Q and X₄ is W.
[0180] 20. The thrombin sensitive Factor X molecule according to aspect 9, wherein X₃ is P and X₄ is W.
[0181] 21. The thrombin sensitive Factor X molecule according to aspect 1, wherein
   [0182] X₁₀ is P
   [0183] X₉ is E
   [0184] X₈ is R
   [0185] X₇ is G
   [0186] X₆ is D
   [0187] X₅ is N
   [0188] X₄ is selected from the group consisting of L, I, M, F, V, P or W
   [0189] X₃ is selected from the group consisting of T or S
   [0190] X₂ is P, and
   [0191] X₁ is R.
[0192] 22. The thrombin sensitive Factor X molecule according to aspect 1, wherein
   [0193] X₁₀ is P
   [0194] X₉ is E
   [0195] X₈ is R
   [0196] X₇ is G
   [0197] X₆ is D
   [0198] X₅ is N
   [0199] X₄ is L
   [0200] X₃ is T
   [0201] X₂ is P, and
   [0202] X₁ is R.
[0203] 23. The thrombin sensitive Factor X molecule according to aspect 1, wherein
   [0204] X₁₀ is P
   [0205] X₉ is E
   [0206] X₈ is R
   [0207] X₇ is N
   [0208] X₆ is A
   [0209] X₅ is T
   [0210] X₄ is L
   [0211] X₃ is T
   [0212] X₂ is P, and
   [0213] X₁ is R.
[0214] 24. The thrombin sensitive Factor X molecule according to aspect 1, wherein
   [0215] X₁₀ is G
   [0216] X₉ is G
   [0217] X₈ is G
   [0218] X₇ is N
   [0219] X₆ is A
   [0220] X₅ is T
   [0221] X₄ is L
   [0222] X₃ is D
   [0223] X₂ is P, and
   [0224] X₁ is R.
[0225] 25. The thrombin sensitive Factor X molecule according to aspect 1, wherein
   [0226] X₁₀ is S
   [0227] X₉ is T
   [0228] X₈ is P
   [0229] X₇ is S
   [0230] X₆ is I
   [0231] X₅ is L
   [0232] X₄ is L
   [0233] X₃ is K
   [0234] X₂ is P, and
   [0235] X₁ is R.
[0236] 26. The thrombin sensitive Factor X molecule according to aspect 1, wherein
   [0237] X₁₀ is S
   [0238] X₉ is T
   [0239] X₈ is P
   [0240] X₇ is S
   [0241] X₆ is 1
   [0242] X₅ is L
   [0243] X₄ is F
   [0244] X₃ is K
   [0245] X₂ is P, and
   [0246] X₁ is R.
[0247] 27. The thrombin sensitive Factor X molecule according to aspect 1, wherein
   [0248] X₁₀ is T
   [0249] X₉ is R
   [0250] X₈ is P
   [0251] X₇ is S
   [0252] X₆ is I
   [0253] X₅ is L
   [0254] X₄ is F
   [0255] X₃ is T
   [0256] X₂ is P, and
   [0257] X₁ is R.
[0258] 28. The thrombin sensitive Factor X molecule according to aspect 1, wherein
   [0259] X₁₀ is D
   [0260] X₉ is F
   [0261] X₈ is L
   [0262] X₇ is A
   [0263] X₆ is E
   [0264] X₅ is G
   [0265] X₄ is G
   [0266] X₃ is G
   [0267] X₂ is P, and
   [0268] X₁ is R.
[0269] 29. The thrombin sensitive Factor X molecule according to aspect 1, wherein
   [0270] X₁₀ is N
   [0271] X₉ is E
   [0272] X₈ is S
   [0273] X₇ is T
   [0274] X₆ is T
   [0275] X₅ is K
   [0276] X₄ is I
   [0277] X₃ is K
   [0278] X₂ is P, and
   [0279] X₁ is R.
[0280] 30. The thrombin sensitive Factor X molecule according to any one of the previous aspects, wherein the amino acid sequence of the Factor X molecule differs from the sequence of wild type Factor X by insertion, deletion, and/or substitution of one or more amino acids in Factor X regions outside X₁₀ to X₁.
[0281] 31. A pharmaceutical formulation comprising the Factor X molecule according to any one of aspects 1 to 30 and optionally one or more pharmaceutically acceptable excipients.
[0282] 32. The thrombin sensitive Factor X molecule according to any one of aspects 1 to 30 for use in treatment of haemophilia.
[0283] 33. The thrombin sensitive Factor X molecule according to aspect 1, wherein the Ile in the IVGG motif (amino acid 195 in SEQ ID NO: 1) is selected from the list consisting of: I, L, T and V.
[0284] 34. A method of treating haemophilia in a patient in need thereof comprising administering the thrombin sensitive Factor X molecule according any one of aspects 1 to 30.
[0285] 35. A method of preparing the thrombin sensitive Factor X molecule according to any one of aspects 1 to 30.
[0286] 36. The thrombin sensitive Factor X molecule according to any one of aspects 1 to 30, wherein said Factor X molecule is covalently conjugated to a half-life extending moiety via a glycan in the activation peptide.
[0287] 37. The thrombin sensitive Factor X molecule according to any one of aspects 1 to 30, wherein said Factor X molecule is covalently conjugated to a half-life extending moiety via a cysteine residue in the activation peptide.
[0288] 38. A FX molecule according to any one of aspects 1 to 30 for use in treatment of Factor X deficiency.
[0289] 39. A DNA sequence encoding a recombinant Factor X molecule according to any one of aspects 1 to 30.
[0290] 40. An expression vector comprising the DNA sequence according to any one of aspects 1 to 30.
[0291] 41. A host cell comprising an expression vector according to aspect 40 or a DNA sequence according to aspect 39.
[0292] 42. A method of producing the thrombin sensitive Factor X molecule according to any one of aspects 1 to 30, wherein said method comprises incubating a host cell according to the invention under suitable conditions and subsequently isolating said Factor X molecule.

[0293] The following list of further embodiments is not to be understood in any limiting sense. All embodiments can be combined.

[0294] A Factor X molecule comprising 2 to 10 amino acid modifications (such as 2, 3, 4, 5, 6, 7, 8, 9 or 10 amino acid modifications) in the activation peptide (N-terminally of the FX “IVGG” motif). IVGG motif positions: amino acids 195-198 in SEQ ID NO: 1.

[0295] A Factor X molecule according to the invention, comprising the following amino acid sequence: X₁₀, X₉, X₈, X₇, X₆, X₅, X₄, X₃, X₂, X₁ I, V, G, G (SEQ ID NO: 2), wherein X₁, X₂, X₃, X₄, X₅, X₆, X₇, and X₈ can be any naturally occurring amino acid. The list of naturally occurring amino acids include: G, A, V, L, I, S, T, C, M, P, D, N, E, Q, K, R, H, F, Y, and W.

[0296] A Factor X molecule according to the invention, wherein said Factor X molecule comprises 2-4 amino acid substitutions, such as 2, 3, or 4 amino acid substitutions.

[0297] A Factor X molecule according to the invention, wherein no modifications are made to X₈-X₅. Thus: X₈ is R, X₇ is G, X₆ is D, and X₅ is N. (X₄, X₃, X₂, and X₁ can be any naturally occurring amino acid) wherein the preferred X₁ is R, the preferred X₂ is P, the preferred X₃ is selected from Q, M, R, T, W, K, I, or V and the preferred X₄ is selected from L, I, M, F, V, P or W.

[0298] A Factor X molecule according to the invention, wherein no modifications are made to X₁₀-X₅ and X₂-X₁. Thus: said FX molecule preferably comprises two amino acid substitutions and X₁₀ is P, X₉ is E, X₈ is R, X₇ is G X₆ is D, X₅ is N, X₂ is T, X₁ is R (wherein X₃ and X₄ can be any naturally occurring amino acid, except L at X₃ and N at X₄).

[0299] A Factor X molecule according to the invention, wherein said molecule comprises proline at position X₂.

[0300] A Factor X molecule according to the invention, wherein X₄ is substituted with a hydrophobic or aliphatic amino acid, preferably selected from the list consisting of: L, M, I, F, V, P, and W and X₃ is not a negatively charged amino acid, preferably selected from the list consisting of: Q, M, R, T, W, K, I, and V.

[0301] A Factor X molecule according to the invention, wherein X₄ is selected from the list consisting of: L, M, I, F, V, P, W.

[0302] A Factor X molecule according to the invention, wherein no modifications are made to X₁₀, X₉, X₈, X₇, and X₆ and X₃, X₂, and X₁. Thus, said FX molecule preferably comprises two amino acid substitutions, wherein X₅ and X₄ can be any naturally occurring amino acid, except N at X₅ and N at X₄.

[0303] A Factor X molecule according to the invention, wherein X₂ and X₃ can be any naturally occurring amino acid, except T at position X₂ and L at position X₃.

[0304] A Factor X molecule according to the invention, wherein X₃ and X₄ can be any naturally occurring amino acid, except L at position X₃ and N at position X₄.

[0305] A Factor X molecule according to the invention, wherein no modifications are made to X₁₀, X₉, X₈, X₇, X₆, X₅, X₄, and X₃. Thus said Factor X molecule preferably comprises two amino acid substitutions, wherein X₂ and X₁ can be any naturally occurring amino acid, except T at X₂ and R at X₁. Preferably, X₁ is R. Preferably, X₂ is P.

[0306] A Factor X molecule according to the invention, wherein the Ile in the IVGG motif (amino acid 195 in SEQ ID NO. 1) is substituted with L, T or V.

[0307] A Factor X molecule according to the invention, wherein X₁ is preferably R.

[0308] A Factor X molecule according to the invention, wherein X₂ is preferably P.

[0309] A Factor X molecule according to the invention, wherein said molecule comprises no amino acid insertions.

[0310] A Factor X molecule according to the invention, wherein X₃ is T or S, X₂ is P, and X₁ is R.

[0311] A Factor X molecule according to the invention, wherein said molecule comprises two amino acid substitutions in the activation peptide

[0312] A Factor X molecule according to the invention, wherein said molecule comprises three amino acid substitutions in the activation peptide.

[0313] A Factor X molecule according to the invention, wherein said molecule comprises four amino acid substitutions in the activation peptide.

[0314] A Factor X molecule according to the invention, wherein said molecule comprises an N glycosylation sequence motif (N, X, T/S) in the X₁-X₁₀ motif N-terminally of the IVGG site.

[0315] A Factor X molecule according to the invention, wherein said molecule comprises at least one additional glycosylation site. Preferably, said at least one additional glycosylation site is inserted in the activation peptide and is preferably an N-glycosylation site.

[0316] A Factor X molecule according to the invention, wherein X₈ is N, X₇ is N, X₆ is A, X₅ is T, X₄ is selected from L, I, M, F, V, P or W, X₃ is selected from Q, M, R, T, W, K, I, or V, X₂ is P and X₁ is R.

[0317] A Factor X molecule according to the invention, wherein where X₈ is R, X₇ is G, X₆ is D, X₅ is N, X₄ is selected from L, I, F, M or W, X₃ is T or S, X₂ is P and X₁ is R.

[0318] A Factor X molecule according to the invention, wherein said molecule is conjugated with a half-life extending moiety.

[0319] A Factor X molecule according to the invention, wherein said half-life extending moiety is a polysaccharide such as e.g. PSA or HEP.

[0320] A Factor X molecule according to any one of the preceding embodiments, wherein said half-life extending moiety is selected from the list consisting of: Biocompatible fatty acids and derivatives thereof, Hydroxy Alkyl Starch (HAS) e.g. Hydroxy Ethyl Starch (HES), Poly Ethylene Glycol (PEG), Poly (Glyₓ-Ser_{y})ₙ (HAP), Hyaluronic acid (HA), Heparosan polymers (HEP), Phosphorylcholine-based polymers (PC polymer), Fleximers, Dextran, Poly-sialic acids (PSA), an Fc domain, Transferrin, Albumin, Elastin like peptides, XTEN polymers, Albumin binding peptides, and CTP peptides.

[0321] A Factor X molecule according to the invention, wherein said half-life extending moiety is covalently conjugated to FX via a glycan in the activation peptide.

[0322] A Factor X molecule according to the invention, wherein said half-life extending moiety is covalently conjugated to FX via a sialic acid.

[0323] A Factor X molecule according to the invention, wherein essentially no auto-activation of said molecule occurs. This can be measured in e.g. a buffered solution or in a plasma sample (e.g. as disclosed in the examples).

[0324] A Factor X molecule according to the invention, wherein said molecule has increased activity and/or rate of activation (e.g. as disclosed in the examples).

[0325] A Factor X molecule according to the invention, wherein the in silico predicted MHC II affinity of the altered sequence and flanking 15 amino acids on both sides of the insertion, deletion, and/or substitution in said coagulation factor ranks lower than the top 3% of a large set of random peptides. Preferably, the affinity is lower than the altered region and flanking 15 amino acids in SEQ ID NO: 3.

[0326] A Factor X molecule according to the invention, wherein the in vitro MHC II affinity in a cell-free system is lower than the MHC II affinity of wild type Factor X.

[0327] A Factor X molecule according to the invention, wherein the in vivo MHC II affinity is lower than the MHC II affinity of wild type Factor X.

[0328] A Factor X molecule according to the invention, wherein said molecules does not stimulate T cell proliferation in a cell based assay.

[0329] A Factor X molecule according to the invention, wherein activation of said molecule results in removal of X₈-X₁.

[0330] A Factor X molecule according to the invention, wherein activation of said molecule results in removal of X₁₀-X₁.

[0331] A Factor X molecule according to the invention, wherein X₄-X₁ comprises at least two amino acids substitutions.

[0332] A pharmaceutical formulation comprising a Factor X molecule according to the invention and optionally one or more pharmaceutically acceptable excipients.

[0333] A liquid aqueous formulation comprising a Factor X molecule according to the invention and one or more excipients, wherein one or more of said excipients have inhibitory effects on Factor X activity.

[0334] A Factor X molecule according to the invention, or a pharmaceutical formulation according to the invention for use in treatment of haemophilia.

[0335] A Factor X molecule according to the invention, or a pharmaceutical formulation according to the invention for use in treatment of haemophilia with inhibitors.

[0336] A Factor X molecule according to the invention, or a pharmaceutical formulation according to the invention for use in treatment of blood loss in connection with surgery and/or trauma.

[0337] A Factor X molecule according to the invention, or a pharmaceutical formulation according to the invention for use in treatment of Factor X deficiency.

[0338] A DNA sequence encoding a recombinant coagulation factor according to the invention.

[0339] An expression vector comprising the DNA sequence according to the invention.

[0340] A host cell comprising an expression vector according to the invention or a DNA sequence according to the invention.

[0341] A method of producing a Factor X molecule according to the invention, wherein said method comprises incubating a host cell according to the invention under suitable conditions and subsequently isolating said Factor X molecule.

[0342] A pharmaceutical composition according to the invention, wherein said composition is for IV administration.

[0343] A pharmaceutical composition according to the invention, wherein said composition is for subcutaneous or intradermal administration.

[0344] A method of making a pharmaceutical composition according to the invention, wherein said method comprises mixing a Factor X molecule according to the invention with one or more pharmaceutically acceptable excipients.

[0345] A method of treating haemophilia in a subject, wherein said method comprises administering a therapeutic amount of a Factor X molecule according to the invention, or a pharmaceutical composition according to the invention.

[0346] A method of treating haemophilia with inhibitors in a subject, wherein said method comprises administering a therapeutic amount of a Factor X molecule according to the invention, or a pharmaceutical composition according to the invention.

### EXAMPLES

[0347] The invention is further illustrated in the following non-limiting examples.

[0348] Abbreviations used in examples:

AUS: Arthrobacter ureafaciens sialidase
CMP: Cytidine monophosphate
EDTA: Ethylenediaminetetraacetic acid
Gla: (γ)-carboxyglutamic acid
GlcUA: Glucuronic acid

### GlcNAc: N-acetylglucosamine

### Grx2: Glutaredoxin II

### GSH: Glutathione

[0349] GSSG: Glutathione disulfide

### HEP: HEParosan

[0350] HEP-FX: Heparosan conjugated to Factor X polypeptide (used interchangeably with FX-HEP)
HEP-[N]-FX: HEParosan conjugated via N-glycan to FX.
HEP-[C]-FX: HEParosan conjugated via cysteine to a FX cysteine mutant.
HEP-GSC: GSC-functionalized heparosan polymers
HEP-NH₂: Amine functionalized HEParosan polymer
HEPES: 2-[4-(2-hydroxyethyl)piperazin-1-yl]ethanesulfonic acid

### His: Histidine

### IV: Intravenous

### KO: Knock-out

### MRT: Mean Residence Time

[0351] pdFX: Plasma derived human Factor X
PmHS1: Pasteurella mutocida Heparosan Synthase I
pNA: para-nitroaniline
SXa-11: Factor Xa chromogenic substrate
UDP: Uridine diphosphate

### Example 1

### Protein Design of Thrombin Sensitive Factor X Molecules and Nomenclature

### A. Protein Engineering Strategy for Thrombin Sensitive Factor X Molecules

[0352] Introduction of thrombin sensitive cleavage sequences into the activation peptide of Factor X was accomplished using the four protein engineering strategies described below. It is known that two N-glycans located on amino acids 181 and 191 of wild type Factor X (SEQ ID NO: 1) are important for maintaining the optimal pharmacokinetic profile of Factor X and modified Factor X molecules (US 2011/0293597). Thus a deliberate factor in all of the design concepts was to retain two N-linked glycosylations sites within the activation peptide, with a preference for preserving the same distance between glycosylation sites. FIGS. 5 through 8 set forth the protein design strategies and illustrate modifications to the wild type Factor X sequence used to generate thrombin sensitive Factor X molecules. As shown in FIGS. 5 through 8, the sequence of Factor X is divided into four different regions, which correspond, according to the mature amino acid sequence numbering system in wild type Factor X (SEQ ID NO: 1) to:
[0353] 1) The pro-peptide between positions −27 to −1, which is cleaved by furin to release the two-chain 448 amino acid mature zymogen form of Factor X (including the RKR sequence at the C-terminus of the light chain).
[0354] 2) The light chain between positions 1 to 142, which is comprised of an N-terminal γ-carboxyglutamic acid rich (Gla) domain and two epidermal growth factor (EGF) domains.
[0355] 3) The activation peptide region located between positions 143 and 194.
[0356] 4) The heavy chain serine protease domain between positions 195-448. Processing at the Arg¹⁹⁴-Ile¹⁹⁵ peptide bond results in activation of zymogen Factor X to active Factor Xa with an associated release of the 52 amino acid activation peptide.

[0357] FIG. 5 illustrates a strategy (hereby designated Strategy 1) where 10 amino acids from the natural thrombin substrate of fibrinopeptide A was inserted directly after the NLTR sequence in wild type Factor X (amino acids 191 to 194; numbering according to the mature amino acid sequence (SEQ ID NO: 1))(cf. also US 2011/0293597). The term “fibrinopeptide A” has its general meaning in the art and refers to a small peptide of 16 amino acids cleaved from the N-terminus of fibrinogen by thrombin. Thrombin sensitive Factor X molecules were designed such that a 10 amino acid sequence (X₁₀-X₁) upstream of thrombin cleavage sites in known substrates were inserted directly after the NLTR sequence in wild type Factor X (amino acids 191 to 194; numbering according to the mature amino acid sequence (SEQ ID NO: 1)) and before the amino acids of the IVGG motif (amino acids 195-198; numbering according to the mature amino acid sequence). All natural inserted sequences are such that the X₁ residue is restricted to arginine (R) giving an inserted sequence of the form X₁₀X₉X₈X₇X₆X₅X₄X₃X₂R₁ where amino acids X₁₀-X₂ were selected from all naturally occurring amino acids: G, A, V, L, I, S, T, C, M, P, Q, N, E, D, K, R, H, F, Y, and W.

[0358] FIG. 6 illustrates a strategy (hereby designated Strategy 2) in which thrombin sensitive Factor X molecules were designed such that an 8-10 amino acid sequence (X₁₀-X₁ or X₈-X₁) was inserted directly after the NLTR sequence in wild type Factor X (amino acids 191 to 194; numbering according to the mature amino acid sequence) and before the amino acids of the IVGG motif (amino acids 195-198; numbering according to the mature amino acid sequence (SEQ ID NO: 1)). All inserted sequences are such that the X₁₀-X₅ or X₈-X₅ amino acids represent the corresponding amino acids N-terminally positioned in relation to the α-thrombin cleavage site in human protease activated receptor 4 (PAR4) where X₁₀-X₁ represent amino acids 21 through 30 in the mature PAR4 sequence (Wu et al. (1998) PNAS, 95: 6642-6646 and Nieman and Schmaier (2007) Biochemistry, 46: 8603-8610). The corresponding insertion sequence was thus of the form S₁₀T₉P₈S₇I₆L₅X₄X₃P₂R₁ or P₈S₇I₆L₅X₄X₃P₂R₁ where amino acids X₄ and X₃ were selected from all naturally occurring amino acids: G, A, V, L, I, S, T, C, M, P, Q, N, E, D, K, R, H, F, Y, and W. The preferred amino acid at X₃ is selected from the following amino acids: Q, M, R, K, T, W, L, I, S and V and is preferably non-negative. The preferred amino acid at X₄ is aliphatic or hydrophobic and selected from the following amino acids: L, I, M, F, V, P and W. Amino acids X₂ and X₁ are restricted to P and R, respectively.

[0359] FIG. 7 illustrates a strategy (hereby designated Strategy 3) in which thrombin sensitive Factor X molecules were designed such that the LTR sequence in wild type Factor X (amino acids 192 to 194; numbering according to the mature amino acid sequence (SEQ ID NO: 1)) was replaced by a 6 amino acid sequence (X₆-X₁) of the form A₆T₅X₄X₃P₂R₁ where amino acids X₄ and X₃ were selected from all naturally occurring amino acids: G, A, V, L, I, S, T, C, M, P, Q, N, E, D, K, R, H, F, Y, and W. The preferred amino acid at X₃ is selected from the following amino acids: Q, M, R, K, T, W, L, I, S and V and is preferably non-negative. The preferred amino acid at X₄ is aliphatic or hydrophobic and selected from the following amino acids: L, I, M, F, V, P and W. Amino acids X₂ and X₁ are restricted to P and R, respectively with the R¹⁹⁴ (X₁) being unmodified from the original sequence. In order to preserve an N-glycosylation motif of N×T/S and full glycosylation of N¹⁹¹ (X₇), X₆ and X₅ are fixed as A and T, respectively. This protein design approach minimizes the alterations to the natural Factor X sequence of the activation peptide such that the final construct is fully embodied by a three amino acid insert and two amino acid mutagenesis as set forth in the following exemplar: insertion of A₆T₅X₄ and mutagenesis of L¹⁹² and T¹⁹³ to X₃P₂ with retention of R¹⁹⁴ as R₁.

[0360] FIG. 8 illustrates a strategy (hereby designated Strategy 4) in which thrombin sensitive Factor X molecules were designed such that the NLTR sequence in wild type Factor X (amino acids 191 to 194; numbering according to the mature amino acid sequence (SEQ ID NO: 1)) is replaced by a 4 amino acid sequence (X₄-X₁) of the form X₄T₃P₂R₁ where the amino acids acid X₄ was selected from naturally occurring amino acids: G, A, V, L, I, S, T, C, M, P, Q, N, E, D, K, R, H, F, Y, and W. The preferred amino acid at X₄ is aliphatic or hydrophobic and selected from the following amino acids: L, I, M, F, V, P and W. Amino acids X₃, X₂ and X₁ are restricted to T, P and R, respectively with the R¹⁹⁴ (X₁) being unmodified from the original sequence. In order to preserve an N-glycosylation motif of N×T/S, X₃ was fixed as T such that an N-linked glycosylation site is introduced at N¹⁹⁰ (X₅). This protein design approach minimizes the alterations to the natural Factor X sequence of the activation peptide such that the final construct is fully embodied by three amino acid modifications as set forth in the following exemplar: mutagenesis of N¹⁹¹, L¹⁹² and T¹⁹³ to X₄T₃P₂ with retention of R¹⁹⁴ as R₁.

### B. Nomenclature for the Naming of Thrombin Sensitive Factor X Molecules

[0361] Exemplary thrombin sensitive Factor X molecules provided herein are designated by the following naming nomenclature, which relates to the protein design strategies discussed above in part A. For thrombin sensitive Factor X molecules prepared by either Strategy 1 or Strategy 2 the nomenclature used throughout adhere to the following general terminology: FX ins[194]>[X₁₀X₉X₈X₇X₆X₅X₄X₃X₂X₁], where FX ins[194] refers to the placement of the inserted peptide sequence after amino acid 194 in wild type Factor X (SEQ ID NO: 1) and [X₁₀X₉X₈X₇X₆X₅X₄X₃X₂X₁] or [X₈X₇X₆X₅X₄X₃X₂X₁] refer to the single letter designation amino acid sequence which has been inserted into the activation peptide between R¹⁹⁴ and I¹⁹⁵ of wild type Factor X (SEQ ID NO: 1). For thrombin sensitive Factor X molecules prepared by Strategy 3 the nomenclature used throughout adhere to the following general terminology: FX [191-194]>[X₆X₅X₄X₃X₂X₁], where FX [191-194] refers to substitution of the four amino acids inclusive of the N¹⁹¹ to R¹⁹⁴ sequence of wild type Factor X (SEQ ID NO: 1) with a six amino acid sequence of [X₆X₅X₄X₃X₂X₁] referred to by its single letter amino acid designation. For thrombin sensitive Factor X molecules prepared by Strategy 4 the nomenclature used throughout adhere to the following general terminology: FX [191-194]>[X₄X₃X₂X₁], where FX [191-194] refers to substitution of the four amino acids inclusive of the N¹⁹¹ to R¹⁹⁴ sequence of wild type Factor X (SEQ ID NO: 1) with a four amino acid sequence of [X₄X₃X₂X₁] referred to by its single letter amino acid designation. In particular examples, modified thrombin sensitive Factor X molecules provided herein have further modifications in which a C-terminal HPC4 tag (-HPC4) has been added for purposes of purification (where the term “HPC4” has its general meaning in the art and refers to a small peptide of 11 amino acids, DQVDPRLIDGK, from Protein C used as an affinity purification tag) or the N-terminal γ-carboxyglutamic acid rich (Gla) domain defined by amino acids 1-47 of wild type Factor X (SEQ ID NO: 1) has been deleted (desGla-). Hence, modified thrombin sensitive molecules provided herein can be further described by appending their naming nomenclature with defined N-terminal (desGla-) or C-terminal (-HPC4) modifications.

[0362] Table 1 sets forth the thrombin sensitive Factor X molecules that were generated, with nomenclature indicating the modification to create a thrombin sensitive molecule and discussed herein. The provided SEQ ID NOs refer to the listed Factor X molecules. Also listed are the thrombin cleavage sequences (X₄-X_{4′}), wherein the cleavage occurs between X₁ and X_{1′}.

TABLE 1
Thrombin Sensitive Factor X Molecules

| | SEQ | | SEQ | X₄-X_{4′} |
|---|---|---|---|---|
| | ID | Experimental Compound | ID | Cleavage |
| Compound Name | NO | Name | NO | Sequence |
| FX | 1 | FX-HPC4 | 12 | NLTR-IVGG |
| FX | 3 | FX ins[194] > [DFLAEGGGVR]- | 6 | GGVR-IVGG |
| ins[194] > [DFLAEGGGVR] | | HPC4 | | |
| FX | 3 | desGla-FX | 226 | GGVR-IVGG |
| ins[194] > [DFLAEGGGVR] | | ins[194] > [DFLAEGGGVR]- | | |
| | | HPC4 | | |
| FX | 8 | desGla-FX | 228 | GGPR-IVGG |
| ins[194] > [DFLAEGGGPR] | | ins[194] > [DFLAEGGGPR]- | | |
| | | HPC4 | | |
| FX | 8 | FX ins[194] > [DFLAEGGGPR]- | 10 | GGPR-IVGG |
| ins[194] > [DFLAEGGGPR] | | HPC4 | | |
| FX [191-194] > [NATLMPR] | 16 | FX [191-194] > [NATLMPR]- | 14 | LMPR-IVGG |
| | | HPC4 | | |
| FX [191-194] > [NATLRPR] | 20 | FX [191-194] > [NATLRPR]- | 18 | LRPR-IVGG |
| | | HPC4 | | |
| FX [191-194] > [NATMMPR] | 24 | FX [191-194] > [NATMMPR]- | 22 | MMPR-IVGG |
| | | HPC4 | | |
| FX [191-194] > [NATMRPR] | 28 | FX [191-194] > [NATMRPR]- | 26 | MRPR-IVGG |
| | | HPC4 | | |
| FX [191-194] > [NATMTPR] | 32 | FX [191-194] > [NATMTPR]- | 30 | MTPR-IVGG |
| | | HPC4 | | |
| FX [191-194] > [NATIQPR] | 36 | FX [191-194] > [NATIQPR]-HPC4 | 34 | IQPR-IVGG |
| FX [191-194] > [NATIMPR] | 40 | FX [191-194] > [NATIMPR]-HPC4 | 38 | IMPR-IVGG |
| FX [191-194] > [NATIRPR] | 44 | FX [191-194] > [NATIRPR]-HPC4 | 42 | IRPR-IVGG |
| FX [191-194] > [NATITPR] | 48 | FX [191-194] > [NATITPR]-HPC4 | 46 | ITPR-IVGG |
| FX [191-194] > [NATFRPR] | 52 | FX [191-194] > [NATFRPR]- | 50 | FRPR-IVGG |
| | | HPC4 | | |
| FX [191-194] > [NATLSPR] | 56 | FX [191-194] > [NATLSPR]-HPC4 | 54 | LSPR-IVGG |
| FX [191-194] > [NATLDPR] | 60 | FX [191-194] > [NATLDPR]- | 58 | LDPR-IVGG |
| | | HPC4 | | |
| FX [191-194] > [NATLQPR] | 64 | FX [191-194] > [NATLQPR]- | 62 | LQPR-IVGG |
| | | HPC4 | | |
| FX [191-194] > [NATLTPR] | 68 | FX [191-194] > [NATLTPR]-HPC4 | 66 | LTPR-IVGG |
| FX [191-194] > [NATMQPR] | 72 | FX [191-194] > [NATMQPR]- | 70 | MQPR-IVGG |
| | | HPC4 | | |
| FX [191-194] > [NATIKPR] | 76 | FX [191-194] > [NATIKPR]-HPC4 | 74 | IKPR-IVGG |
| FX [191-194] > [NATLEPR] | 80 | FX [191-194] > [NATLEPR]-HPC4 | 78 | LEPR-IVGG |
| FX [191-194] > [NATDTPR] | 84 | FX [191-194] > [NATDTPR]- | 82 | DTPR-IVGG |
| | | HPC4 | | |
| FX [191-194] > [NATLKPR] | 88 | FX [191-194] > [NATLKPR]-HPC4 | 86 | LKPR-IVGG |
| FX [191-194] > [NATFTPR] | 92 | FX [191-194] > [NATFTPR]-HPC4 | 90 | FTPR-IVGG |
| FX [191-194] > [NATFKPR] | 96 | FX [191-194] > [NATFKPR]- | 94 | FKPR-IVGG |
| | | HPC4 | | |
| FX [191-194] > [NATMKPR] | 100 | FX [191-194] > [NATMKPR]- | 98 | MKPR-IVGG |
| | | HPC4 | | |
| FX [191-194] > [NATWQPR] | 104 | FX [191-194] > [NATWQPR]- | 102 | WQPR-IVGG |
| | | HPC4 | | |
| FX [191-194] > [LTPR] | 108 | FX [191-194] > [LTPR]-HPC4 | 106 | LTPR-IVGG |
| FX [191-194] > [MTPR] | 112 | FX [191-194] > [MTPR]-HPC4 | 110 | MTPR-IVGG |
| FX [191-194] > [ITPR] | 116 | FX [191-194] > [ITPR]-HPC4 | 114 | ITPR-IVGG |
| FX [191-194] > [FTPR] | 120 | FX [191-194] > [FTPR]-HPC4 | 118 | FTPR-IVGG |
| FX | 124 | FX ins[194] > [STPSILLKPR]- | 122 | LKPR-IVGG |
| ins[194] > [STPSILLKPR] | | HPC4 | | |
| FX | 128 | FX ins[194] > [STPSILFTPR]- | 126 | FTPR-IVGG |
| ins[194] > [STPSILFTPR] | | HPC4 | | |
| FX | 132 | FX ins[194] > [STPSILFKPR]- | 130 | FKPR-IVGG |
| ins[194] > [STPSILFKPR] | | HPC4 | | |
| FX | 136 | FX ins[194] > [STPSILMKPR]- | 134 | MKPR-IVGG |
| ins[194] > [STPSILMKPR] | | HPC4 | | |
| FX | 140 | FX ins[194] > [STPSILWQPR]1 | 138 | WQPR-IVGG |
| ins[194] > [STPSILWQPR] | | HPC4 | | |
| FX | 144 | FX ins[194] > [STPSILLRPR]- | 142 | LRPR-IVGG |
| ins[194] > [STPSILLRPR] | | HPC4 | | |
| FX | 148 | FX ins[194] > [STPSILMTPR]- | 146 | MTPR-IVGG |
| ins[194] > [STPSILMTPR] | | HPC4 | | |
| FX ins[194] > [PSILLKPR] | 152 | FX ins[194] > [PSILLKPR]-HPC4 | 150 | LKPR-IVGG |
| FX ins[194] > [PSILFTPR] | 156 | FX ins[194] > [PSILFTPR]-HPC4 | 154 | FTPR-IVGG |
| FX ins[194] > [PSILFKPR] | 160 | FX ins[194] > [PSILFKPR]-HPC4 | 158 | FKPR-IVGG |
| FX ins[194] > [PSILMKPR] | 164 | FX ins[194] > [PSILMKPR]-HPC4 | 162 | MKPR-IVGG |
| FX ins[194] > [PSILWQPR] | 168 | FX ins[194] > [PSILWQPR]-HPC4 | 166 | WQPR-IVGG |
| FX ins[194] > [PSILLRPR] | 172 | FX ins[194] > [PSILLRPR]-HPC4 | 170 | LRPR-IVGG |
| FX ins[194] > [PSILMTPR] | 176 | FX ins[194] > [PSILMTPR]-HPC4 | 174 | MTPR-IVGG |
| FX | 180 | desGla-FX | 178 | FNPR-IVGG |
| ins[194] > [SEYQTFFNPR] | | ins[194] > [SEYQTFFNPR]-HPC4 | | |
| FX | 184 | desGla-FX | 182 | IKPR-IVGG |
| ins[194] > [NESTTKIKPR] | | ins[194] > [NESTTKIKPR]-HPC4 | | |
| FX | 188 | desGla-FX | 186 | PAPR-IVGG |
| ins[194] > [STPSILPAPR] | | ins[194] > [STPSILPAPR]-HPC4 | | |
| FX | 192 | desGla-FX | 190 | VVPR-IVGG |
| ins[194] > [TVELQGVVPR] | | ins[194] > [TVELQGVVPR]-HPC4 | | |
| FX | 196 | desGla-FX | 194 | IQIR-IVGG |
| ins[194] > [DNSPSFIQIR] | | ins[194] > [DNSPSFIQIR]-HPC4 | | |
| FX | 200 | desGla-FX | 198 | FSAR-IVGG |
| ins[194] > [DNEEGFFSAR] | | ins[194] > [DNEEGFFSAR]-HPC4 | | |
| FX | 204 | desGla-FX | 202 | WYLR-IVGG |
| ins[194] > [PDNIAAVVYLR] | | ins[194] > [PDNIAAWYLR]-HPC4 | | |
| FX | 208 | desGla-FX | 206 | IEPR-IVGG |
| ins[194] > [LSKNNAIEPR] | | ins[194] > [LSKNNAIEPR]-HPC4 | | |
| FX | 212 | desGla-FX | 210 | QSPR-IVGG |
| ins[194] > [YDEDENQSPR] | | ins[194] > [YDEDENQSPR]- | | |
| | | HPC4 | | |
| FX | 216 | desGla-FX | 214 | LSPR-IVGG |
| ins[194] > [HTHHAPLSPR] | | ins[194] > [HTHHAPLSPR]-HPC4 | | |
| FX | 220 | desGla-FX | 218 | LGIR-IVGG |
| ins[194] > [NRLAAALGIR] | | ins[194] > [NRLAAALGIR]-HPC4 | | |
| FX | 224 | desGla-FX | 222 | LDPR-IVGG |
| ins[194] > [KATNATLDPR ] | | ins[194] > [KATNATLDPR ]-HPC4 | | |
| FX [191- | 232 | FX [191- | 230 | LDPR-IVGG |
| 194] > [GGGSGGGKEEEDI | | 194] > [GGGSGGGKEEEDIEFEE | | |
| EFEEFESSPKPDGSGGG | | FESSPKPDGSGGGSGGGNAT | | |
| SGGGNATLDPR] | | LDPR]-HPC4 | | |
| FX [191- | 236 | FX [191- | 234 | LDPR-IVGG |
| 194] > [GGGSGGGSGDPK | | 194] > [GGGSGGGSGDPKPSSE | | |
| PSSEFEEFEIDEEEKGGG | | FEEFEIDEEEKGGGSGGGNAT | | |
| SGGGNATLDPR] | | LDPR]-HPC4 | | |

### Example 2

### Generation of the Quenched Fluorescence Peptide Substrate Library

### A. Library Construction and Synthesis

[0363] Solid phase resin Pal-ChemMatrix was purchased by PCAS BioMatrix and all Fmoc-amino acid were from Protein technologies, except for Fmoc-Lys(Dnp)-OH (IRIS Gmbh, Germany) and Fmoc-Lys(retro Boc)Abz (Bachem). Oxyma Pure was purchased from Merck (Switzerland) N-methyl-pyrrolidinone (NMP), diisopropylcarbodiimide (DIC), trifluoroacetic acid (TFA) were peptide grade and obtained from Biosolve (Netherlands).

[0364] A quenched fluorescence peptide substrate library using an o-aminobenzoic acid (Abz) fluorescence donor and a 2,4-dinitrophenyl (Dnp) quencher moiety with the amino acid sequence of Lys(Dnp)-ATNATX₄X₃PRIVGG-Lys(Abz) (SEQ ID NO: 237) was constructed by randomizing every possible natural amino acid combination in X₄ and X₃ with the exception of cysteine. The quenched fluorescence peptide substrates (QF-substrates) were synthesized by a standard Fmoc-strategy on Multipep RS (Intavis, Germany) in 96-well microtiter filter plates (Nunc). In each well was distributed 15 mg resin and three couplings were done in each synthesis cycle. A single coupling step consisted of adding to each well 90 μL Fmoc-amino acid (0.3 M in NMP containing 0.3 M Oxymapure)+30 μL DIC and 30 μL collidine. Before adding the amino acids to the resin, they were preactivated in a mixer vial according to the multipep RS manufacturer instructions. The first coupling step was coupled for 15 minutes, coupling step 2 was coupled for 1 hour and coupling step three was coupled for 3 hours. After coupling step 3, the resin was washed using 300 μL NMP to each well five times using the manifold as described by the manufacture. A deprotection step of the Fmoc group was accomplished by adding 200 μL 25% piperidine twice to each well. The first deprotection step was allowed to proceed for 2 minutes and the second step was allowed to proceed for 8 minutes. After the last deprotection step the resin was washed as previously described.

[0365] After the solid phase synthesis reaction, the resin was washed 7 times with ethanol by adding 300 μL to each well. The resin was allowed to dry overnight and subsequently was deprotected with 4% triisopropylsilane, 1% thioanisol and 3% H₂O in 92% TFA. This was done by placing the filter plate on top of a 2 mL deep-well collector plate. Then 250 μL TFA was added to each well and the TFA was allowed to flow through. After 2 minutes this was repeated and after 5 min another 250 μL was added and allowed to stand for 1-2 hours. The resin was washed with 2×250 μL TFA (as described above) and the collected TFA was concentrated to approximately 100-150 μL by argon flow. The peptides were precipitated with diethyl ether and transferred to a filter plate (Solvinert, Millipore) and the precipitated peptides were washed with diethyl ether five times. A Solvinert filter plate was placed on top of a 2 ml deep-well plate (master plate) and the peptides were dissolved in 80% DMSO (in H₂O). The filter plates were shaken gently overnight and then the peptides were transferred to the master plate by evacuation in a Waters vacuum manifold. Five randomly chosen peptides from each of the four library plates were analysed by MALDI and the identity confirmed.

### B. Determination of the Stock Concentration for Quenched Fluorescence Peptide Substrates

[0366] Quenched fluorescence substrate (QF-substrate) samples synthesized in house (described above) or by an external supplier (Aurigene, Bangalore, India) were typically stored in 80% DMSO or resuspended from a lyophilized powder in 100% DMSO, respectively. The molar concentration of a stock of QF peptide substrate was typically determined from the absorbance of the 2,4-dinitrophenyl (Dnp) quencher moiety by one of the two following two methods. In the first example, the stock concentration was determined directly from the absorbance of the QF-substrate peptide solution at 365 nm using an extinction coefficient of 17,300 M⁻¹ cm⁻¹ for the Dnp quencher moiety (Carmona et al. (2006) Nature Protocols 1: 1971-1976). In order to determine the concentration, stock samples (˜5-20 mM) were serially diluted in fresh DMSO 1:10 and 1:100 in a 96-well polypropylene plate. The Nanodrop-1000 was used to quantitate the absorbance of a 2 μL sample of the 1:100 or 1:10 dilution to achieve an absorbance reading of 0.1-0.8 AU in UV/Vis mode with a 1 nm path length. Readings were acquired in duplicate from independently diluted samples and averaged. The concentration of a QF-substrate (in mM) was then determined from the following equation which corrects for the 1 mm path length:

[QF-Substrate]=((Abs₃₆₅×dilution×10)/Ext. Coefficient)×1000

[0367] The QF-substrate libraries were typically prepared to a stock concentration of 4500 μM (i.e. 4.5 mM). Each substrate plate (96-well) was diluted to an estimated concentration of 500 μM in 100% DMSO (10 μL of stock+80 μL of DMSO). This dilution was used to prepare a dilution plate for quantification by mixing 40 μL with 60 μL of assay buffer (50 mM Hepes, 150 mM NaCl, 10 mM CaCl₂, 0.1% PEG8000, pH 7.4). The absorbance at 365 nm of the diluted QF peptide substrate stock was quantified using a Molecular Devices absorbance spectrometer with duplicate readings that were averaged. The concentration of each QF peptide substrate was subsequently confirmed by comparison to a standard curve (0 to 450 nM) of a control QF peptide substrate diluted in 50% DMSO/assay buffer. The concentration of the control QF peptide stock solution was determined directly from the absorbance at 365 nm as described above.

### Example 3

### Screening the Quenched Fluorescence Peptide Library to Evaluate the Kinetic Rate Constant for Thrombin Cleavage

[0368] In order to determine the cleavage rates for the QF peptide substrate library, a progress curve protocol was designed for evaluating the kinetics of substrate cleavage by thrombin. The progress curve method assumed that the reaction followed a simple Michaelis Menten mechanism with the encounter complex of substrate and enzyme being limiting (i.e. psuedo-1^{st} order). Under conditions where [QF-substrate]<<K_{M} this method allowed for an estimation of the k_{cat}/K_{M} from an exponential fit of the complete reaction progress curves (i.e. complete substrate hydrolysis over time). The stock concentrations of each QF substrate (up to 96 per plate) were confirmed to be in the range of ˜3500-4500 μM using the plate method described in Example 2 above. To initiate the cleavage reactions, the QF peptide substrates (in a 96-well format) were first diluted to ˜500 μM in 100% DMSO by mixing 10 μL of stock substrate+80 μL DMSO followed by two subsequent serial dilutions with assay buffer (50 mM Hepes, 150 mM NaCl, 10 mM CaCl₂, 0.1% PEG8000, pH 7.4) taking 20 μl of dilution 1+80 μL assay buffer (˜100 μM in 20% DMSO) and then 20 μL of dilution 2+180 μL assay buffer (˜10 μM in 2% DMSO). Human plasma purified α-thrombin was diluted from the stock to a working concentration of 1 μM in assay buffer. Progress curve reactions were initiated by combining 100 μL of QF substrate dilution three (˜10 μM in 2% DMSO) with 80 μL of assay buffer and 20 μL of 1 μM thrombin in a 96-well black assay plate. Reactions were followed in a Molecular Devices fluorescence spectrometer for 3 hours at 37° C. using an excitation wavelength of 320 nm and an emission wavelength of 420 nm without any cut-off filter.

[0369] Data collected using the SoftMax Pro software were exported as .txt files for analysis using Excel analysis templates and non-linear regression analysis using the GraphPad/Prism software suite. Progress curves were fit to the following equation:

Y=F₀+Fₘₐₓ*(1−exp(−E*k*x))

where x=reaction time, F₀=the initial fluorescence intensity, Fₘₐₓ=the maximum fluorescence intensity at complete hydrolysis, k=the kinetic rate constant in the form of k_{cat}/K_{M} with the units of M⁻¹s⁻¹ and E=the enzyme concentration in M units.

[0370] Table 2 and Table 3 set forth the data generated from screening the quenched fluorescence positional scanning library and a set of rationally designed quenched fluorescence substrates based on natural thrombin cleavage sequences, respectively. The quenched fluorescence positional scanning library (X₄/X₃) was based on the PAR 1 thrombin cleavage sequence (table 2), however, using a fixed prime side sequence of IVGG, such that the library is of the form Lys(Dnp)-ATNATX₄X₃PRIVGG-Lys(Abz), where Lys(Dnp) and Lys(Abz) (SEQ ID NO: 238) are the fluorescence quencher and donor moieties, respectively. The rationally designed QF-substrates based on natural thrombin cleavage sequences (Table 3) were synthesized by Aurigene (Bangalore, India) and also contained a fixed prime side sequence of IVGG, such that the library is of the form Lys(Dnp)-X₁₀X₉X₈X₇X₆X₅X₄X₃X₂X₁IVGG-Lys(Abz), where Lys(Dnp) and Lys(Abz) (SEQ ID NO: 239) are the fluorescence quencher and donor moieties, respectively. Data are presented in Tables 2 and 3 as the ranked k_{cat}/K_{M} rate constants, standard deviation, % CV as well as the fold improvement over the PAR 1 control substrate sequence [Lys(Dnp)-ATNATLDPRIVGG-Lys(Abz)] (SEQ ID NO: 241) and the Fibrinopeptide A (FpA) substrate sequence [Lys(Dnp)-DFLAEGGGVRIVGG-Lys(Abz)] (SEQ ID NO: 240).

[0371] At least 20 sequences were selected from the QF-substrate library with >20-fold improved cleavage rates (k_{cat}/K_{M}) over the parent PAR-1 sequence and up to 120-fold improved cleavage rates over the FpA substrate sequence. Likewise, several natural thrombin sequences (Table 3) demonstrated 5 to 14-fold improved cleavage rates of that of the PAR-1 control and up to 100-fold improved cleavage rates over the FpA control substrate sequence. The most improved natural substrate was shown to be the FpA_P sequence, which has a proline residue at X₂ instead of the naturally occurring valine. Based on the results of the QF-substrate library screenings, the following preferred sequence motifs were determined for X₄, X₃ and X₂ with a fixed X₁ amino acid of arginine (R). The preferred amino acid in X₂ is proline (P), while the preferred amino acid in X₃ is fairly flexible and selected from Q, M, R, T, W, K, I or V, but is not negative or proline. The preferred amino acid in position X₄ is more restricted, being mostly aliphatic or hydrophobic and selected from L, I, M, F, V, P or W, but is not charged or selected from G, S or T.

TABLE 2
X₄/X₃ Positional Scanning Quenched Fluorescence Library
X₄/X₃ Positional Scanning Quenched Fluorescence Library:
form Lys(Dnp)-ATNATX₄X₃PRIVGG-Lys(Abz), where Lys(Dnp)
and Lys(Abz) (SEQ ID NO: 238) are the fluorescence quencher
and donor moieties, respectively. All amino acid variants
herein can form part of FX molecules according to the invention.

| | | | | | | Fold- | Fold- |
|---|---|---|---|---|---|---|---|
| | | k_{cat}/K_{M} | | | | Improved | Improved |
| X₄ | X₃ | (M⁻¹s⁻¹) | S.D. | % CV | n = | (PAR-1) | (FpA) |
| L | Q | 4.9E+04 | 4.9E+03 | 10% | 2 | 17.4 | 119.6 |
| L | M | 4.7E+04 | 2.2E+03 | 5% | 2 | 16.6 | 114.4 |
| L | R | 4.5E+04 | 6.0E+03 | 13% | 2 | 16.0 | 110.4 |
| I | Q | 4.4E+04 | 2.7E+03 | 6% | 2 | 15.7 | 108.2 |
| L | T | 4.4E+04 | 1.0E+03 | 2% | 2 | 15.6 | 107.7 |
| F | R | 4.3E+04 | 5.0E+03 | 12% | 2 | 15.4 | 106.5 |
| I | M | 4.1E+04 | 1.5E+03 | 4% | 2 | 14.6 | 100.8 |
| I | R | 3.7E+04 | 1.3E+02 | 0% | 2 | 13.2 | 91.2 |
| L | W | 3.6E+04 | 2.1E+02 | 1% | 2 | 13.0 | 89.6 |
| M | R | 3.5E+04 | 1.0E+03 | 3% | 2 | 12.3 | 85.1 |
| L | I | 3.4E+04 | 2.1E+03 | 6% | 2 | 12.0 | 82.7 |
| I | W | 3.3E+04 | 1.8E+03 | 5% | 2 | 11.8 | 81.2 |
| M | Q | 3.3E+04 | 8.7E+02 | 3% | 2 | 11.6 | 80.0 |
| M | T | 3.2E+04 | 1.9E+03 | 6% | 2 | 11.4 | 78.7 |
| I | T | 3.2E+04 | 1.2E+03 | 4% | 2 | 11.3 | 78.1 |
| L | K | 3.2E+04 | 2.3E+03 | 7% | 2 | 11.3 | 77.6 |
| F | Q | 3.0E+04 | 1.8E+03 | 6% | 2 | 10.8 | 74.6 |
| L | V | 3.0E+04 | 3.8E+02 | 1% | 2 | 10.5 | 72.6 |
| M | M | 2.8E+04 | 5.7E+02 | 2% | 2 | 9.9 | 67.9 |
| F | T | 2.7E+04 | 1.2E+03 | 5% | 2 | 9.6 | 66.3 |
| P | W | 2.7E+04 | 3.8E+02 | 1% | 2 | 9.5 | 65.4 |
| P | Q | 2.6E+04 | 1.5E+03 | 6% | 2 | 9.4 | 64.6 |
| I | I | 2.6E+04 | 1.9E+03 | 7% | 2 | 9.4 | 64.5 |
| I | H | 2.6E+04 | 1.3E+03 | 5% | 2 | 9.2 | 63.6 |
| L | H | 2.5E+04 | 5.8E+02 | 2% | 2 | 9.0 | 61.7 |
| F | K | 2.5E+04 | 1.6E+03 | 7% | 2 | 8.9 | 61.6 |
| F | M | 2.4E+04 | 1.4E+03 | 6% | 2 | 8.5 | 58.6 |
| I | V | 2.4E+04 | 1.4E+03 | 6% | 2 | 8.4 | 58.2 |
| I | K | 2.4E+04 | 4.6E+02 | 2% | 2 | 8.4 | 58.2 |
| V | W | 2.3E+04 | 7.2E+02 | 3% | 2 | 8.2 | 56.3 |
| W | R | 2.3E+04 | 2.0E+02 | 1% | 2 | 8.1 | 55.5 |
| M | K | 2.3E+04 | 4.7E+02 | 2% | 2 | 8.0 | 55.4 |
| P | T | 2.2E+04 | 2.6E+01 | 0% | 2 | 7.7 | 53.1 |
| L | S | 2.1E+04 | 3.4E+02 | 2% | 2 | 7.5 | 51.4 |
| V | Q | 2.1E+04 | 5.0E+02 | 2% | 2 | 7.4 | 51.3 |
| L | Y | 2.1E+04 | 6.9E+02 | 3% | 2 | 7.4 | 51.2 |
| F | W | 2.0E+04 | 1.1E+03 | 6% | 2 | 7.0 | 48.5 |
| A | R | 2.0E+04 | 3.4E+02 | 2% | 2 | 7.0 | 48.0 |
| W | Q | 1.9E+04 | 8.8E+02 | 5% | 2 | 6.8 | 47.0 |
| M | S | 1.8E+04 | 7.8E+02 | 4% | 2 | 6.6 | 45.3 |
| I | Y | 1.8E+04 | 2.3E+01 | 0% | 2 | 6.4 | 44.3 |
| P | I | 1.8E+04 | 2.8E+02 | 2% | 2 | 6.4 | 44.0 |
| M | W | 1.8E+04 | 2.8E+03 | 16% | 2 | 6.3 | 43.7 |
| M | H | 1.8E+04 | 6.7E+02 | 4% | 2 | 6.3 | 43.5 |
| M | I | 1.8E+04 | 5.3E+02 | 3% | 2 | 6.2 | 43.0 |
| F | H | 1.7E+04 | 9.5E+02 | 6% | 2 | 6.1 | 42.2 |
| P | R | 1.7E+04 | 5.5E+02 | 3% | 2 | 6.0 | 41.3 |
| M | V | 1.7E+04 | 1.9E+02 | 1% | 2 | 6.0 | 41.2 |
| W | S | 1.6E+04 | 7.8E+01 | 0% | 2 | 5.8 | 40.3 |
| W | T | 1.6E+04 | 1.1E+02 | 1% | 2 | 5.8 | 40.1 |
| V | R | 1.6E+04 | 1.5E+02 | 1% | 2 | 5.8 | 39.7 |
| A | T | 1.6E+04 | 1.3E+03 | 8% | 2 | 5.8 | 39.7 |
| V | T | 1.6E+04 | 7.8E+02 | 5% | 2 | 5.6 | 38.9 |
| L | L | 1.6E+04 | 7.4E+02 | 5% | 2 | 5.6 | 38.7 |
| L | F | 1.5E+04 | 2.1E+03 | 14% | 2 | 5.4 | 36.9 |
| V | M | 1.5E+04 | 6.2E+02 | 4% | 2 | 5.3 | 36.8 |
| A | W | 1.5E+04 | 1.6E+03 | 11% | 2 | 5.3 | 36.3 |
| I | L | 1.5E+04 | 3.9E+02 | 3% | 2 | 5.2 | 35.9 |
| P | H | 1.5E+04 | 3.6E+02 | 2% | 2 | 5.2 | 35.8 |
| L | E | 1.4E+04 | 9.5E+02 | 7% | 2 | 5.0 | 34.2 |
| P | Y | 1.4E+04 | 1.6E+02 | 1% | 2 | 5.0 | 34.1 |
| F | G | 1.4E+04 | 5.5E+02 | 4% | 2 | 4.9 | 33.9 |
| I | S | 1.4E+04 | 1.9E+03 | 14% | 2 | 4.9 | 33.8 |
| P | M | 1.4E+04 | 5.4E+02 | 4% | 2 | 4.9 | 33.8 |
| L | N | 1.4E+04 | 7.2E+02 | 5% | 2 | 4.9 | 33.6 |
| W | A | 1.3E+04 | 3.5E+02 | 3% | 2 | 4.7 | 32.5 |
| I | F | 1.3E+04 | 1.8E+02 | 1% | 2 | 4.7 | 32.3 |
| P | V | 1.3E+04 | 1.4E+02 | 1% | 2 | 4.7 | 32.2 |
| W | K | 1.3E+04 | 1.9E+02 | 1% | 2 | 4.7 | 32.2 |
| V | I | 1.3E+04 | 3.5E+02 | 3% | 2 | 4.7 | 32.2 |
| L | A | 1.3E+04 | 1.0E+02 | 1% | 2 | 4.6 | 31.9 |
| V | H | 1.3E+04 | 5.7E+02 | 4% | 2 | 4.6 | 31.6 |
| A | Q | 1.2E+04 | 2.3E+01 | 0% | 2 | 4.3 | 29.8 |
| M | Y | 1.2E+04 | 4.6E+02 | 4% | 2 | 4.3 | 29.7 |
| A | I | 1.2E+04 | 9.0E+02 | 8% | 2 | 4.3 | 29.3 |
| P | S | 1.2E+04 | 3.6E+02 | 3% | 2 | 4.2 | 28.7 |
| F | Y | 1.2E+04 | 2.8E+02 | 2% | 2 | 4.2 | 28.7 |
| M | A | 1.2E+04 | 5.3E+02 | 5% | 2 | 4.1 | 28.6 |
| I | E | 1.2E+04 | 5.5E+02 | 5% | 2 | 4.1 | 28.5 |
| A | Y | 1.1E+04 | 4.1E+03 | 36% | 2 | 4.1 | 28.1 |
| W | G | 1.1E+04 | 4.7E+02 | 4% | 2 | 4.1 | 28.1 |
| V | Y | 1.1E+04 | 6.6E+02 | 6% | 2 | 3.9 | 27.2 |
| V | V | 1.1E+04 | 6.0E+02 | 6% | 2 | 3.9 | 26.8 |
| M | F | 1.1E+04 | 1.4E+02 | 1% | 2 | 3.8 | 26.4 |
| M | L | 1.1E+04 | 1.2E+03 | 12% | 2 | 3.8 | 26.2 |
| A | K | 1.1E+04 | 5.0E+02 | 5% | 2 | 3.8 | 26.2 |
| I | N | 1.0E+04 | 7.3E+02 | 7% | 2 | 3.7 | 25.2 |
| Q | Q | 1.0E+04 | 2.7E+02 | 3% | 2 | 3.6 | 25.0 |
| F | S | 9.9E+03 | 3.6E+03 | 36% | 2 | 3.5 | 24.2 |
| V | K | 9.9E+03 | 6.0E+02 | 6% | 2 | 3.5 | 24.2 |
| A | V | 9.7E+03 | 3.4E+02 | 4% | 2 | 3.5 | 23.9 |
| W | P | 9.7E+03 | 1.4E+04 | 140% | 2 | 3.5 | 23.8 |
| Q | R | 9.6E+03 | 7.8E+02 | 8% | 2 | 3.4 | 23.7 |
| F | F | 9.5E+03 | 6.4E+02 | 7% | 2 | 3.4 | 23.4 |
| Y | R | 9.5E+03 | 3.1E+02 | 3% | 2 | 3.4 | 23.4 |
| F | L | 9.5E+03 | 9.5E+02 | 10% | 2 | 3.4 | 23.4 |
| P | K | 9.4E+03 | 2.1E+01 | 0% | 2 | 3.3 | 23.0 |
| A | S | 9.1E+03 | 7.9E+02 | 9% | 2 | 3.2 | 22.3 |
| A | M | 9.0E+03 | 5.6E+02 | 6% | 2 | 3.2 | 22.1 |
| P | F | 9.0E+03 | 2.5E+02 | 3% | 2 | 3.2 | 22.0 |
| F | A | 8.9E+03 | 7.0E+02 | 8% | 2 | 3.2 | 21.8 |
| I | A | 8.7E+03 | 1.9E+03 | 22% | 2 | 3.1 | 21.4 |
| Y | Q | 8.6E+03 | 3.2E+02 | 4% | 2 | 3.1 | 21.1 |
| I | G | 8.6E+03 | 3.8E+02 | 4% | 2 | 3.1 | 21.0 |
| V | F | 8.4E+03 | 8.1E+02 | 10% | 2 | 3.0 | 20.5 |
| M | N | 8.3E+03 | 5.3E+02 | 6% | 2 | 3.0 | 20.4 |
| Q | M | 8.1E+03 | 9.4E+02 | 12% | 2 | 2.9 | 19.9 |
| L | G | 8.1E+03 | 1.3E+02 | 2% | 2 | 2.9 | 19.9 |
| Q | I | 7.9E+03 | 2.5E+02 | 3% | 2 | 2.8 | 19.3 |
| Q | W | 7.8E+03 | 4.0E+02 | 5% | 2 | 2.8 | 19.0 |
| P | L | 7.7E+03 | 1.4E+01 | 0% | 2 | 2.7 | 18.8 |
| V | S | 7.6E+03 | 8.8E+02 | 12% | 2 | 2.7 | 18.7 |
| P | E | 7.5E+03 | 1.4E+02 | 2% | 2 | 2.7 | 18.5 |
| Y | T | 7.5E+03 | 3.5E+02 | 5% | 2 | 2.7 | 18.5 |
| Q | T | 7.4E+03 | 3.9E+02 | 5% | 2 | 2.6 | 18.1 |
| A | H | 7.4E+03 | 2.5E+02 | 3% | 2 | 2.6 | 18.1 |
| Q | H | 7.3E+03 | 2.0E+03 | 28% | 2 | 2.6 | 18.0 |
| P | G | 7.2E+03 | 1.4E+02 | 2% | 2 | 2.6 | 17.6 |
| W | M | 7.2E+03 | 1.9E+02 | 3% | 2 | 2.6 | 17.6 |
| F | V | 7.1E+03 | 2.4E+02 | 3% | 2 | 2.5 | 17.3 |
| P | A | 7.0E+03 | 6.7E+01 | 1% | 2 | 2.5 | 17.3 |
| F | I | 7.0E+03 | 8.1E+02 | 12% | 2 | 2.5 | 17.1 |
| M | E | 6.8E+03 | 4.8E+02 | 7% | 2 | 2.4 | 16.7 |
| P | N | 6.7E+03 | 6.7E+01 | 1% | 2 | 2.4 | 16.4 |
| Y | S | 6.5E+03 | 3.4E+02 | 5% | 2 | 2.3 | 15.9 |
| Y | W | 6.4E+03 | 1.3E+01 | 0% | 2 | 2.3 | 15.7 |
| A | L | 6.3E+03 | 5.9E+02 | 9% | 2 | 2.2 | 15.4 |
| A | A | 6.2E+03 | 3.2E+01 | 1% | 2 | 2.2 | 15.3 |
| F | N | 6.2E+03 | 8.0E+02 | 13% | 2 | 2.2 | 15.1 |
| A | F | 5.9E+03 | 4.0E+02 | 7% | 2 | 2.1 | 14.5 |
| M | G | 5.9E+03 | 4.7E+02 | 8% | 2 | 2.1 | 14.5 |
| F | E | 5.6E+03 | 2.8E+02 | 5% | 2 | 2.0 | 13.7 |
| Q | V | 5.4E+03 | 6.9E+02 | 13% | 2 | 1.9 | 13.4 |
| V | E | 5.4E+03 | 1.3E+02 | 2% | 2 | 1.9 | 13.2 |
| W | H | 5.4E+03 | 2.8E+02 | 5% | 2 | 1.9 | 13.1 |
| Q | K | 5.3E+03 | 6.4E+02 | 12% | 2 | 1.9 | 13.0 |
| V | N | 5.2E+03 | 3.5E+02 | 7% | 2 | 1.8 | 12.7 |
| V | G | 5.1E+03 | 3.0E+02 | 6% | 2 | 1.8 | 12.5 |
| V | L | 5.0E+03 | 1.9E+02 | 4% | 2 | 1.8 | 12.3 |
| Y | K | 5.0E+03 | 1.2E+02 | 2% | 2 | 1.8 | 12.3 |
| Y | H | 4.8E+03 | 3.6E+02 | 7% | 2 | 1.7 | 11.9 |
| Y | A | 4.8E+03 | 2.4E+02 | 5% | 2 | 1.7 | 11.7 |
| Q | Y | 4.7E+03 | 1.8E+02 | 4% | 2 | 1.7 | 11.5 |
| W | Y | 4.3E+03 | 5.3E+01 | 1% | 2 | 1.5 | 10.7 |
| Y | M | 4.3E+03 | 6.3E+01 | 1% | 2 | 1.5 | 10.4 |
| V | A | 4.2E+03 | 5.2E+02 | 12% | 2 | 1.5 | 10.3 |
| A | N | 4.0E+03 | 2.4E+02 | 6% | 2 | 1.4 | 9.8 |
| W | V | 3.9E+03 | 3.7E+02 | 9% | 2 | 1.4 | 9.7 |
| Y | Y | 3.8E+03 | 1.8E+02 | 5% | 2 | 1.4 | 9.3 |
| W | W | 3.8E+03 | 6.0E+02 | 16% | 2 | 1.3 | 9.2 |
| Y | G | 3.7E+03 | 2.8E+01 | 1% | 2 | 1.3 | 9.0 |
| Q | F | 3.6E+03 | 2.2E+01 | 1% | 2 | 1.3 | 8.9 |
| R | D | 3.6E+03 | 1.8E+03 | 50% | 2 | 1.3 | 8.8 |
| Q | L | 3.5E+03 | 2.3E+01 | 1% | 2 | 1.2 | 8.5 |
| A | G | 3.4E+03 | 1.4E+01 | 0% | 2 | 1.2 | 8.3 |
| A | E | 3.3E+03 | 5.8E+01 | 2% | 2 | 1.2 | 8.2 |
| W | N | 3.2E+03 | 2.2E+02 | 7% | 2 | 1.1 | 7.9 |
| L | D | 3.1E+03 | 4.2E+02 | 13% | 2 | 1.1 | 7.7 |
| Q | S | 3.1E+03 | 2.1E+02 | 7% | 2 | 1.1 | 7.6 |
| L | D | 3.1E+03 | 2.5E+02 | 8% | 2 | 1.1 | 7.5 |
| L | D | 3.0E+03 | 4.1E+02 | 13% | 2 | 1.1 | 7.4 |
| L | D | 3.0E+03 | 4.0E+02 | 13% | 2 | 1.1 | 7.3 |
| L | D | 3.0E+03 | 1.4E+02 | 5% | 2 | 1.1 | 7.3 |
| L | D | 3.0E+03 | 1.9E+02 | 6% | 2 | 1.1 | 7.3 |
| G | W | 2.9E+03 | 1.4E+02 | 5% | 2 | 1.0 | 7.2 |
| L | D | 2.8E+03 | 3.7E+02 | 13% | 2 | 1.0 | 7.0 |
| H | W | 2.8E+03 | 8.3E+01 | 3% | 2 | 1.0 | 6.9 |
| R | P | 2.8E+03 | 4.5E+02 | 16% | 2 | 1.0 | 6.9 |
| G | T | 2.7E+03 | 5.4E+01 | 2% | 2 | 1.0 | 6.7 |
| L | D | 2.7E+03 | 1.1E+01 | 0% | 2 | 1.0 | 6.7 |
| T | W | 2.7E+03 | 2.4E+02 | 9% | 2 | 1.0 | 6.7 |
| L | D | 2.7E+03 | 8.3E+00 | 0% | 2 | 1.0 | 6.6 |
| L | D | 2.7E+03 | 2.1E+02 | 8% | 2 | 1.0 | 6.6 |
| G | R | 2.7E+03 | 2.1E+01 | 1% | 2 | 1.0 | 6.6 |
| L | D | 2.7E+03 | 1.5E+02 | 6% | 2 | 1.0 | 6.6 |
| Y | F | 2.6E+03 | 1.1E+02 | 4% | 2 | 0.9 | 6.5 |
| L | D | 2.6E+03 | 1.8E+02 | 7% | 2 | 0.9 | 6.3 |
| L | D | 2.5E+03 | 1.3E+02 | 5% | 2 | 0.9 | 6.1 |
| W | F | 2.4E+03 | 2.3E+00 | 0% | 2 | 0.9 | 5.9 |
| T | R | 2.3E+03 | 8.8E+00 | 0% | 2 | 0.8 | 5.6 |
| S | R | 2.3E+03 | 2.0E+00 | 0% | 2 | 0.8 | 5.6 |
| Y | N | 2.2E+03 | 8.4E+01 | 4% | 2 | 0.8 | 5.4 |
| H | R | 2.2E+03 | 3.2E+01 | 2% | 2 | 0.8 | 5.3 |
| W | E | 2.1E+03 | 3.7E+02 | 17% | 2 | 0.7 | 5.2 |
| Y | L | 2.1E+03 | 1.3E+02 | 6% | 2 | 0.7 | 5.1 |
| A | D | 2.1E+03 | 1.7E+03 | 80% | 2 | 0.7 | 5.1 |
| Y | I | 2.1E+03 | 5.1E+01 | 2% | 2 | 0.7 | 5.1 |
| I | D | 2.0E+03 | 1.3E+02 | 7% | 2 | 0.7 | 4.9 |
| H | H | 2.0E+03 | 1.3E+02 | 7% | 2 | 0.7 | 4.8 |
| P | D | 2.0E+03 | 1.3E+01 | 1% | 2 | 0.7 | 4.8 |
| Q | N | 2.0E+03 | 5.7E+01 | 3% | 2 | 0.7 | 4.8 |
| W | I | 1.9E+03 | 1.6E−02 | 0% | 2 | 0.7 | 4.6 |
| Q | A | 1.8E+03 | 1.4E+01 | 1% | 2 | 0.7 | 4.5 |
| Q | E | 1.8E+03 | 1.6E+02 | 9% | 2 | 0.7 | 4.5 |
| W | L | 1.8E+03 | 3.0E+02 | 17% | 2 | 0.6 | 4.4 |
| H | Q | 1.8E+03 | 2.5E+02 | 14% | 2 | 0.6 | 4.3 |
| Y | V | 1.7E+03 | 3.0E+01 | 2% | 2 | 0.6 | 4.3 |
| Y | E | 1.7E+03 | 2.7E+01 | 2% | 2 | 0.6 | 4.1 |
| K | D | 1.6E+03 | 1.0E+02 | 6% | 2 | 0.6 | 4.0 |
| M | D | 1.6E+03 | 1.6E+02 | 10% | 2 | 0.6 | 4.0 |
| S | W | 1.5E+03 | 1.3E+02 | 9% | 2 | 0.5 | 3.8 |
| H | T | 1.5E+03 | 3.7E+01 | 2% | 2 | 0.5 | 3.7 |
| A | P | 1.5E+03 | 6.0E+00 | 0% | 2 | 0.5 | 3.6 |
| G | Y | 1.5E+03 | 9.3E+00 | 1% | 2 | 0.5 | 3.6 |
| R | W | 1.5E+03 | 2.0E+02 | 14% | 2 | 0.5 | 3.6 |
| N | R | 1.4E+03 | 8.6E+01 | 6% | 2 | 0.5 | 3.5 |
| S | T | 1.4E+03 | 3.3E+00 | 0% | 2 | 0.5 | 3.5 |
| T | Q | 1.4E+03 | 2.0E+01 | 1% | 2 | 0.5 | 3.4 |
| T | Y | 1.4E+03 | 9.7E+00 | 1% | 2 | 0.5 | 3.4 |
| G | Q | 1.4E+03 | 7.7E+00 | 1% | 2 | 0.5 | 3.4 |
| I | P | 1.3E+03 | 9.9E+01 | 7% | 2 | 0.5 | 3.3 |
| T | H | 1.3E+03 | 9.5E+01 | 7% | 2 | 0.5 | 3.2 |
| G | S | 1.3E+03 | 1.6E+00 | 0% | 2 | 0.5 | 3.2 |
| F | D | 1.3E+03 | 2.6E+01 | 2% | 2 | 0.5 | 3.2 |
| G | I | 1.3E+03 | 1.2E−01 | 0% | 2 | 0.5 | 3.1 |
| H | M | 1.3E+03 | 2.1E+02 | 17% | 2 | 0.5 | 3.1 |
| T | T | 1.3E+03 | 2.7E+00 | 0% | 2 | 0.5 | 3.1 |
| H | Y | 1.3E+03 | 5.6E+01 | 4% | 2 | 0.5 | 3.1 |
| H | S | 1.3E+03 | 2.2E+01 | 2% | 2 | 0.5 | 3.1 |
| T | M | 1.2E+03 | 3.2E+01 | 3% | 2 | 0.4 | 3.1 |
| G | K | 1.2E+03 | 2.0E+01 | 2% | 2 | 0.4 | 3.0 |
| G | H | 1.2E+03 | 5.5E+01 | 5% | 2 | 0.4 | 3.0 |
| G | M | 1.2E+03 | 2.4E+01 | 2% | 2 | 0.4 | 2.9 |
| S | Q | 1.2E+03 | 2.4E+01 | 2% | 2 | 0.4 | 2.9 |
| H | K | 1.2E+03 | 2.1E+01 | 2% | 2 | 0.4 | 2.9 |
| E | D | 1.2E+03 | 1.7E+03 | 141% | 2 | 0.4 | 2.9 |
| T | I | 1.2E+03 | 4.4E+01 | 4% | 2 | 0.4 | 2.9 |
| G | F | 1.2E+03 | 3.9E+01 | 3% | 2 | 0.4 | 2.9 |
| W | D | 1.2E+03 | 4.3E+01 | 4% | 2 | 0.4 | 2.9 |
| N | W | 1.2E+03 | 1.8E+02 | 15% | 2 | 0.4 | 2.8 |
| G | V | 1.2E+03 | 2.0E+01 | 2% | 2 | 0.4 | 2.8 |
| T | K | 1.1E+03 | 1.5E+01 | 1% | 2 | 0.4 | 2.8 |
| K | W | 1.1E+03 | 3.4E+01 | 3% | 2 | 0.4 | 2.8 |
| E | R | 1.1E+03 | 2.5E+01 | 2% | 2 | 0.4 | 2.7 |
| V | D | 1.1E+03 | 8.2E+01 | 8% | 2 | 0.4 | 2.7 |
| S | K | 1.1E+03 | 1.0E+01 | 1% | 2 | 0.4 | 2.7 |
| S | Y | 1.1E+03 | 1.0E+02 | 9% | 2 | 0.4 | 2.6 |
| S | I | 1.1E+03 | 4.6E+00 | 0% | 2 | 0.4 | 2.6 |
| Q | G | 1.1E+03 | 9.4E+01 | 9% | 2 | 0.4 | 2.6 |
| G | L | 1.1E+03 | 2.8E+01 | 3% | 2 | 0.4 | 2.6 |
| S | H | 1.1E+03 | 2.6E+01 | 3% | 2 | 0.4 | 2.6 |
| S | S | 1.0E+03 | 1.6E+01 | 2% | 2 | 0.4 | 2.5 |
| H | F | 1.0E+03 | 3.1E+02 | 30% | 2 | 0.4 | 2.5 |
| T | D | 1.0E+03 | 3.0E+01 | 3% | 2 | 0.4 | 2.5 |
| H | G | 1.0E+03 | 1.7E+02 | 17% | 2 | 0.4 | 2.5 |
| D | H | 1.0E+03 | 6.5E+02 | 65% | 2 | 0.4 | 2.5 |
| R | I | 1.0E+03 | 2.0E+01 | 2% | 2 | 0.4 | 2.4 |
| M | P | 9.9E+02 | 3.8E+02 | 39% | 2 | 0.4 | 2.4 |
| K | I | 9.9E+02 | 1.1E+01 | 1% | 2 | 0.4 | 2.4 |
| T | V | 9.8E+02 | 1.3E+01 | 1% | 2 | 0.3 | 2.4 |
| R | R | 9.8E+02 | 4.6E+01 | 5% | 2 | 0.3 | 2.4 |
| H | A | 9.6E+02 | 7.2E+01 | 7% | 2 | 0.3 | 2.4 |
| S | M | 9.6E+02 | 4.3E+00 | 0% | 2 | 0.3 | 2.4 |
| R | H | 9.6E+02 | 4.5E+01 | 5% | 2 | 0.3 | 2.3 |
| G | A | 9.5E+02 | 1.2E+01 | 1% | 2 | 0.3 | 2.3 |
| S | F | 9.4E+02 | 6.8E+01 | 7% | 2 | 0.3 | 2.3 |
| R | L | 9.2E+02 | 1.9E+01 | 2% | 2 | 0.3 | 2.3 |
| K | H | 9.0E+02 | 2.6E+02 | 29% | 2 | 0.3 | 2.2 |
| T | S | 8.9E+02 | 2.5E+01 | 3% | 2 | 0.3 | 2.2 |
| S | V | 8.9E+02 | 2.1E+01 | 2% | 2 | 0.3 | 2.2 |
| Y | D | 8.9E+02 | 1.1E+01 | 1% | 2 | 0.3 | 2.2 |
| R | G | 8.8E+02 | 3.9E+02 | 44% | 2 | 0.3 | 2.2 |
| K | L | 8.8E+02 | 4.9E+01 | 6% | 2 | 0.3 | 2.2 |
| N | T | 8.7E+02 | 2.4E+01 | 3% | 2 | 0.3 | 2.1 |
| R | E | 8.7E+02 | 1.1E+02 | 12% | 2 | 0.3 | 2.1 |
| E | F | 8.7E+02 | 2.2E+02 | 25% | 2 | 0.3 | 2.1 |
| P | P | 8.5E+02 | 3.5E+01 | 4% | 2 | 0.3 | 2.1 |
| G | G | 8.2E+02 | 1.7E+01 | 2% | 2 | 0.3 | 2.0 |
| T | P | 8.2E+02 | 3.8E+01 | 5% | 2 | 0.3 | 2.0 |
| H | I | 8.2E+02 | 3.6E+02 | 44% | 2 | 0.3 | 2.0 |
| H | N | 8.0E+02 | 1.6E+01 | 2% | 2 | 0.3 | 2.0 |
| K | M | 8.0E+02 | 1.4E+01 | 2% | 2 | 0.3 | 2.0 |
| S | L | 7.9E+02 | 5.5E+01 | 7% | 2 | 0.3 | 1.9 |
| R | M | 7.9E+02 | 4.1E+01 | 5% | 2 | 0.3 | 1.9 |
| S | A | 7.9E+02 | 4.4E+01 | 6% | 2 | 0.3 | 1.9 |
| N | Y | 7.8E+02 | 3.6E+01 | 5% | 2 | 0.3 | 1.9 |
| N | F | 7.8E+02 | 1.3E+02 | 16% | 2 | 0.3 | 1.9 |
| K | R | 7.8E+02 | 1.2E+01 | 2% | 2 | 0.3 | 1.9 |
| S | G | 7.7E+02 | 3.3E+01 | 4% | 2 | 0.3 | 1.9 |
| T | G | 7.7E+02 | 1.3E+02 | 17% | 2 | 0.3 | 1.9 |
| R | F | 7.7E+02 | 5.3E+01 | 7% | 2 | 0.3 | 1.9 |
| K | F | 7.5E+02 | 2.4E+02 | 32% | 2 | 0.3 | 1.8 |
| N | K | 7.5E+02 | 8.5E+00 | 1% | 2 | 0.3 | 1.8 |
| T | L | 7.5E+02 | 4.7E+01 | 6% | 2 | 0.3 | 1.8 |
| N | Q | 7.4E+02 | 9.6E+01 | 13% | 2 | 0.3 | 1.8 |
| H | P | 7.4E+02 | 3.1E+02 | 41% | 2 | 0.3 | 1.8 |
| S | D | 7.4E+02 | 2.0E+02 | 27% | 2 | 0.3 | 1.8 |
| F | P | 7.3E+02 | 4.6E+02 | 63% | 2 | 0.3 | 1.8 |
| N | M | 7.2E+02 | 5.1E+01 | 7% | 2 | 0.3 | 1.8 |
| K | Y | 7.0E+02 | 3.6E+01 | 5% | 2 | 0.2 | 1.7 |
| G | N | 7.0E+02 | 3.8E+01 | 5% | 2 | 0.2 | 1.7 |
| T | E | 7.0E+02 | 5.0E+01 | 7% | 2 | 0.2 | 1.7 |
| R | Y | 6.9E+02 | 2.1E+00 | 0% | 2 | 0.2 | 1.7 |
| E | H | 6.9E+02 | 2.1E+02 | 31% | 2 | 0.2 | 1.7 |
| R | A | 6.7E+02 | 5.7E+01 | 9% | 2 | 0.2 | 1.6 |
| R | N | 6.7E+02 | 3.7E+01 | 6% | 2 | 0.2 | 1.6 |
| R | S | 6.6E+02 | 3.9E+00 | 1% | 2 | 0.2 | 1.6 |
| N | H | 6.6E+02 | 2.9E+00 | 0% | 2 | 0.2 | 1.6 |
| E | K | 6.5E+02 | 2.3E+02 | 35% | 2 | 0.2 | 1.6 |
| N | L | 6.5E+02 | 1.8E+02 | 27% | 2 | 0.2 | 1.6 |
| N | I | 6.4E+02 | 1.0E+02 | 16% | 2 | 0.2 | 1.6 |
| R | Q | 6.4E+02 | 3.2E+01 | 5% | 2 | 0.2 | 1.6 |
| T | F | 6.4E+02 | 5.3E+02 | 83% | 2 | 0.2 | 1.6 |
| R | T | 6.4E+02 | 1.6E+02 | 25% | 2 | 0.2 | 1.6 |
| N | S | 6.4E+02 | 6.0E+01 | 9% | 2 | 0.2 | 1.6 |
| K | Q | 6.4E+02 | 2.1E+01 | 3% | 2 | 0.2 | 1.6 |
| T | A | 6.3E+02 | 3.2E+00 | 1% | 2 | 0.2 | 1.6 |
| K | T | 6.1E+02 | 2.3E+00 | 0% | 2 | 0.2 | 1.5 |
| D | F | 6.0E+02 | 8.5E+02 | 141% | 2 | 0.2 | 1.5 |
| T | N | 6.0E+02 | 1.9E+01 | 3% | 2 | 0.2 | 1.5 |
| R | K | 5.9E+02 | 1.1E+01 | 2% | 2 | 0.2 | 1.5 |
| K | V | 5.9E+02 | 2.6E+01 | 4% | 2 | 0.2 | 1.5 |
| R | V | 5.9E+02 | 1.9E+01 | 3% | 2 | 0.2 | 1.4 |
| N | V | 5.5E+02 | 5.8E+01 | 11% | 2 | 0.2 | 1.4 |
| S | N | 5.4E+02 | 1.7E+01 | 3% | 2 | 0.2 | 1.3 |
| G | D | 5.4E+02 | 9.1E+01 | 17% | 2 | 0.2 | 1.3 |
| H | V | 5.4E+02 | 5.2E+02 | 97% | 2 | 0.2 | 1.3 |
| K | K | 5.2E+02 | 2.9E+01 | 6% | 2 | 0.2 | 1.3 |
| G | E | 5.1E+02 | 1.5E+01 | 3% | 2 | 0.2 | 1.3 |
| N | G | 5.0E+02 | 8.1E+01 | 16% | 2 | 0.2 | 1.2 |
| Q | D | 5.0E+02 | 7.9E+01 | 16% | 2 | 0.2 | 1.2 |
| H | D | 4.9E+02 | 9.0E+01 | 19% | 2 | 0.2 | 1.2 |
| H | L | 4.7E+02 | 8.8E+00 | 2% | 2 | 0.2 | 1.1 |
| K | S | 4.7E+02 | 1.2E+01 | 3% | 2 | 0.2 | 1.1 |
| E | I | 4.6E+02 | 1.6E+02 | 36% | 2 | 0.2 | 1.1 |
| D | V | 4.6E+02 | 6.4E+02 | 140% | 2 | 0.2 | 1.1 |
| K | G | 4.6E+02 | 1.2E+01 | 3% | 2 | 0.2 | 1.1 |
| S | P | 4.5E+02 | 3.6E+01 | 8% | 2 | 0.2 | 1.1 |
| N | A | 4.3E+02 | 1.1E+02 | 27% | 2 | 0.2 | 1.0 |
| G | P | 4.3E+02 | 2.4E+00 | 1% | 2 | 0.2 | 1.0 |
| E | Y | 4.3E+02 | 2.1E+02 | 50% | 2 | 0.2 | 1.0 |
| D | Y | 4.1E+02 | 5.8E+02 | 140% | 2 | 0.1 | 1.0 |
| E | A | 4.0E+02 | 2.1E+02 | 53% | 2 | 0.1 | 1.0 |
| S | E | 3.9E+02 | 9.2E+00 | 2% | 2 | 0.1 | 1.0 |
| E | W | 3.9E+02 | 3.9E+02 | 101% | 2 | 0.1 | 0.9 |
| E | T | 3.9E+02 | 1.0E+02 | 27% | 2 | 0.1 | 0.9 |
| Y | P | 3.8E+02 | 8.1E+01 | 21% | 2 | 0.1 | 0.9 |
| K | N | 3.7E+02 | 2.6E+01 | 7% | 2 | 0.1 | 0.9 |
| K | A | 3.6E+02 | 5.9E+00 | 2% | 2 | 0.1 | 0.9 |
| D | G | 3.5E+02 | 2.7E+02 | 78% | 2 | 0.1 | 0.8 |
| D | R | 3.4E+02 | 1.8E+02 | 54% | 2 | 0.1 | 0.8 |
| N | N | 2.9E+02 | 1.6E+02 | 55% | 2 | 0.1 | 0.7 |
| K | E | 2.7E+02 | 2.1E+02 | 77% | 2 | 0.1 | 0.7 |
| D | T | 2.5E+02 | 3.4E+02 | 140% | 2 | 0.1 | 0.6 |
| H | E | 2.3E+02 | 2.3E+02 | 98% | 2 | 0.1 | 0.6 |
| D | L | 2.1E+02 | 2.8E+02 | 137% | 2 | 0.1 | 0.5 |
| E | L | 2.1E+02 | 2.2E+02 | 107% | 2 | 0.1 | 0.5 |
| E | V | 2.0E+02 | 2.0E+02 | 98% | 2 | 0.1 | 0.5 |
| D | Q | 1.6E+02 | 2.3E+02 | 140% | 2 | 0.1 | 0.4 |
| E | S | 1.6E+02 | 1.2E+02 | 75% | 2 | 0.1 | 0.4 |
| E | M | 1.5E+02 | 1.4E+02 | 89% | 2 | 0.1 | 0.4 |
| N | E | 1.5E+02 | 2.1E+02 | 137% | 2 | 0.1 | 0.4 |
| D | M | 1.4E+02 | 1.9E+02 | 137% | 2 | 0.05 | 0.3 |
| D | N | 1.3E+02 | 1.8E+02 | 141% | 2 | 0.05 | 0.3 |
| E | Q | 1.1E+02 | 8.4E+01 | 77% | 2 | 0.04 | 0.3 |
| E | G | 9.8E+01 | 6.1E+01 | 62% | 2 | 0.03 | 0.2 |
| V | P | 9.5E+01 | 8.2E+01 | 86% | 2 | 0.03 | 0.2 |
| D | I | 3.0E+01 | 3.0E+01 | 101% | 2 | 0.01 | 0.1 |
| E | N | 1.7E+01 | 2.1E+01 | 121% | 2 | 0.01 | 0.04 |
| D | S | 1.5E+01 | 1.8E+01 | 126% | 2 | 0.01 | 0.04 |
| E | E | 1.4E+01 | 1.8E+01 | 126% | 2 | 0.01 | 0.03 |
| D | W | 1.4E+01 | 1.5E+01 | 108% | 2 | 0.01 | 0.03 |
| L | P | 1.1E+01 | 3.2E+00 | 29% | 2 | 0.004 | 0.03 |
| D | K | 1.0E+01 | 1.3E+01 | 121% | 2 | 0.004 | 0.03 |
| N | P | 9.0E+00 | 1.2E+01 | 134% | 2 | 0.003 | 0.02 |
| D | A | 7.7E+00 | 8.8E+00 | 114% | 2 | 0.003 | 0.02 |
| N | D | 3.0E+00 | 3.7E+00 | 123% | 2 | 0.001 | 0.01 |
| E | P | 2.0E+00 | 2.9E+00 | 141% | 2 | 0.001 | 0.005 |
| D | D | 2.2E−03 | 2.2E−03 | 101% | 2 | 0.000 | 0.000 |
| D | P | 6.6E−04 | 1.3E−04 | 19% | 2 | 0.000 | 0.000 |
| K | P | 5.6E−04 | 9.2E−06 | 2% | 2 | 0.000 | 0.000 |
| D | E | 4.0E−04 | 5.6E−04 | 141% | 2 | 0.000 | 0.000 |
| Q | P | 0.0E+00 | 0.0E+00 | n/a | 2 | 0.000 | 0.000 |

TABLE 3
Rationally Designed (Natural Sequence) Quenched Fluorescence Library

| | | | | | | | | | | | | | | Fold- | Fold- |
|---|---|---|---|---|---|---|---|---|---|---|---|---|---|---|---|
| | | | | | | | | | | | k_{cat}/K_{M} | | | Improved | Improved |
| Natural Substrate | X₁₀ | X₉ | X₈ | X₇ | X₆ | X₅ | X₄ | X₃ | X₂ | X₁ | (M⁻¹s⁻¹) | % CV | n = | (PAR-1) | (FpA) |
| FpA_P | D | F | L | A | E | G | G | G | P | R | 4.0E+04 | 23% | 18 | 14.2 | 97.8 |
| Factor V (1) | H | T | H | H | A | P | L | S | P | R | 3.1E+04 | 39% | 12 | 11.2 | 77.2 |
| Thrombin (1) | D | Q | V | T | V | A | M | T | P | R | 3.0E+04 | 11% | 12 | 10.7 | 73.6 |
| Factor XI | N | E | S | T | T | K | I | K | P | R | 2.0E+04 | 11% | 18 | 7.1 | 49.2 |
| Thrombin (2) | S | E | Y | Q | T | F | F | N | P | R | 2.0E+04 | 16% | 6 | 7.1 | 48.7 |
| Factor VIII (1) | L | S | K | N | N | A | I | E | P | R | 1.3E+04 | 6% | 6 | 4.7 | 32.3 |
| Factor XIII | T | V | E | L | Q | G | V | V | P | R | 1.2E+04 | 42% | 11 | 4.2 | 28.7 |
| PAR 4 | S | T | P | S | I | L | P | A | P | R | 9.4E+03 | 18% | 11 | 3.4 | 23.1 |
| TAFI | Q | I | S | N | D | T | V | S | P | R | 5.3E+03 | 26% | 6 | 1.9 | 13.1 |
| PAR 1 | K | A | T | N | A | T | L | D | P | R | 3.9E+03 | 10% | 18 | 1.4 | 9.7 |
| PAR 1 | — | — | T | N | A | T | L | D | P | R | 3.6E+03 | 16% | 11 | 1.3 | 8.9 |
| PAR 1 | — | — | — | — | A | T | L | D | P | R | 3.3E+03 | 15% | 12 | 1.2 | 8.2 |
| Protein C | E | D | Q | E | D | Q | V | D | P | R | 1.8E+03 | 5% | 6 | 0.6 | 4.4 |
| Factor VIII (2) | Y | D | E | D | E | N | Q | S | P | R | 9.3E+02 | 50% | 12 | 0.3 | 2.3 |
| Factor V (2) | N | R | L | A | A | A | L | G | I | R | 7.2E+02 | 137% | 6 | 0.3 | 1.8 |
| Osteopontin | R | G | D | S | V | V | Y | G | L | R | 4.1E+02 | 113% | 6 | 0.1 | 1.0 |
| FpA | D | F | L | A | E | G | G | G | V | R | 4.1E+02 | 79% | 9 | 0.1 | 1.0 |
| FpB | D | N | E | E | G | F | F | S | A | R | 3.0E+02 | 48% | 6 | 0.1 | 0.7 |
| Factor V (3) | P | D | N | I | A | A | W | Y | L | R | 9.8E+01 | 15% | 6 | 0.03 | 0.2 |
| PAR 3 | N | L | A | K | P | T | L | P | I | K | 1.6E+01 | 73% | 5 | 0.01 | 0.04 |
| Antithrombin | A | S | T | A | V | V | I | A | G | R | 3.1E−01 | 75% | 6 | 0.000 | 0.001 |
| Thrombin (3) | E | D | S | D | R | A | I | E | G | R | 0.0E+00 | n/a | 7 | 0.000 | 0.000 |

### Example 4

### Screening the Quenched Fluorescence Peptide Library to Evaluate the Kinetic Rate Constant for Factor Xa Cleavage and Identify Thrombin-Specific Cleavage Sequences

[0372] The objective was to identify the preferred thrombin cleavage sequences described herein with respect to Example 3, above, that additionally display the lowest rates for cleavage by Factor Xa. In order to determine the cleavage rates for the QF peptide substrate library, a progress curve protocol was designed for evaluating the kinetics of substrate cleavage by Factor Xa relative to that of thrombin. The protocol was essentially as described above for α-thrombin with only minor modifications. The progress curve method assumed that the reaction followed a simple Michaelis Menten mechanism with the encounter complex of substrate and enzyme being limiting (i.e. psuedo-1^{St}-order). Under conditions where [QF-substrate]<<K_{M} this method allowed for an estimation of the k_{cat}/K_{M} from an exponential fit of the complete reaction progress curves (i.e. complete substrate hydrolysis over time). The stock concentrations of each QF substrate (up to 96 per plate) were confirmed to be in the range of ˜3500-4500 μM using the plate method described in Example 2 above. To initiate the cleavage reactions, the QF peptide substrates (in a 96-well format) were first diluted to ˜500 μM in 100% DMSO by mixing 10 μL of stock substrate+80 μL DMSO followed by two subsequent serial dilutions with assay buffer (50 mM Hepes, 150 mM NaCl, 10 mM CaCl₂, 0.1% PEG8000, pH 7.4) taking 20 μl of dilution 1+80 μL assay buffer (˜100 μM in 20% DMSO) and then 20 μL of dilution 2+180 μL assay buffer (˜10 μM in 2% DMSO). Human plasma purified Factor Xa (Molecular Innovations, Inc, Novi Mich., USA) was diluted from the stock to a working concentration of 4 μM in assay buffer. Progress curve reactions were initiated by combining 100 μL of QF substrate dilution three (˜10 μM in 2% DMSO) with 80 μL of assay buffer and 20 μL of 4 μM thrombin in a 96-well black assay plate. Reactions were followed in a Molecular Devices fluorescence spectrometer for 3 hours at 37° C. using an excitation wavelength of 320 nm and an emission wavelength of 420 nm without any cut-off filter. Data collected using the SoftMax Pro software were exported as .txt files for analysis using Excel analysis templates and non-linear regression analysis using the GraphPad/Prism software suite. Progress curves were fit to the following equation:

Y=F₀+Fₘₐₓ*(1−exp(−E*k*x))

where x=reaction time, F₀=the initial fluorescence intensity, Fₘₐₓ=the maximum fluorescence intensity at complete hydrolysis, k=the kinetic rate constant in the form of k_{cat}/K_{M} with the units of M⁻¹s⁻¹ and E=the enzyme concentration in M units.

[0373] Tables 4 and Table 5 set forth the data generated from screening the quenched fluorescence positional scanning library and a set of rationally designed quenched fluorescence substrates based on natural thrombin cleavage sequences, respectively. The quenched fluorescence positional scanning library (X₄/X₃) was based on the PAR 1 thrombin cleavage sequence (Table 4), however, using a fixed prime side sequence of IVGG, such that the library is of the form Lys(Dnp)-ATNATX₄X₃PRIVGG-Lys(Abz), where Lys(Dnp) and Lys(Abz) (SEQ ID NO: 238) are the fluorescence quencher and donor moieties, respectively. The rationally designed QF-substrates based on natural thrombin cleavage sequences (Table 5) were synthesized by Aurigene (Bangalore, India) and also contained a fixed prime side sequence of IVGG, such that the library is of the form Lys(Dnp)-X₁₀, X₉X₈X₇X₆X₅X₄X₃X₂X₁IVGG-Lys(Abz), where Lys(Dnp) and Lys(Abz) (SEQ ID NO: 239) are the fluorescence quencher and donor moieties, respectively. Data are presented in Tables 4 and 5 as the ranked functional selectivity calculation, wherein functional selectivity is defined as the k_{cat}/K_{M} value for α-thrombin (FIIa) cleavage multiplied by the specificity ratio (Ala k_{cat}/K_{M} divided by FXa k_{cat}/K_{M}). As described herein, the QF-substrate sequences with a high functional selectivity value are a representation of those sequences which have the highest rate of α-thrombin cleavage paired to the greatest specificity for cleavage by α-thrombin compared to Factor Xa. Also shown are the specificity ratio and k_{cat}/K_{M} values for Factor Xa cleavage and thrombin (FIIa) cleavage of the substrate library (data reproduced from Example 3) with standard deviation and % CV shown for the FXa cleavage data.

[0374] Five sequences were selected from the QF-substrate library with >400-fold specificity ratio (Table 4). Thus of the QF-substrate sequences provided herein, the sequences (X₄-X₁) of FTPR, FKPR, LKPR, WQPR and WPPR showed the highest specificity ratio. In addition to these five sequences, the sequences; MTPR WTPR and MKPR demonstrated a ˜300-fold specificity ratios, but also functional selectivity values of 7.0E+06 to 1.0E+07.

TABLE 4
X₄/X₃ Positional Scanning Quenched Fluorescence Library
X₄/X₃ Positional Scanning Quenched Fluorescence Library:
form Lys(Dnp)-ATNATX₄X₃PRIVGG-Lys(Abz), where Lys(Dnp)
and Lys(Abz) (SEQ ID NO 238) are the fluorescence quencher
and donor moieties, respectively. All amino acid variants
herein can form part of FX molecules according to the invention.

| | | | | | | | | Functional |
|---|---|---|---|---|---|---|---|---|
| | | FXa | | | | FIIa | Specificity | Selectivity |
| | | k_{cat}/K_{M} | | | | k_{cat}/K_{M} | Ratio | (Specificity*FIIa |
| X₄ | X₃ | (M⁻¹s⁻¹) | S.D. | % CV | n | (M⁻¹s⁻¹) | (FIIa/FXa) | k_{cat}/K_{M}) |
| F | T | 4.9E+01 | 1.5E+01 | 31% | 2 | 2.7E+04 | 549 | 1.5E+07 |
| L | K | 7.2E+01 | 1.1E+01 | 16% | 2 | 3.2E+04 | 438 | 1.4E+07 |
| F | K | 5.5E+01 | 4.8E+00 | 9% | 2 | 2.5E+04 | 459 | 1.2E+07 |
| M | T | 9.7E+01 | 1.6E+01 | 17% | 2 | 3.2E+04 | 332 | 1.1E+07 |
| W | Q | 3.7E+01 | 2.2E+01 | 60% | 2 | 1.9E+04 | 511 | 9.8E+06 |
| M | K | 7.2E+01 | 4.0E+00 | 6% | 2 | 2.3E+04 | 312 | 7.0E+06 |
| W | T | 4.6E+01 | 3.0E−01 | 1% | 2 | 1.6E+04 | 355 | 5.8E+06 |
| W | P | 1.7E+01 | 2.2E+00 | 13% | 2 | 9.7E+03 | 581 | 5.6E+06 |
| W | S | 5.2E+01 | 8.8E+00 | 17% | 2 | 1.6E+04 | 318 | 5.2E+06 |
| A | Y | 2.6E+01 | 3.7E+00 | 15% | 2 | 1.1E+04 | 448 | 5.1E+06 |
| I | K | 1.2E+02 | 3.4E+01 | 28% | 2 | 2.4E+04 | 197 | 4.7E+06 |
| F | R | 4.3E+02 | 2.8E+02 | 66% | 2 | 4.3E+04 | 101 | 4.4E+06 |
| W | K | 4.1E+01 | 1.8E+00 | 4% | 2 | 1.3E+04 | 317 | 4.2E+06 |
| W | A | 4.2E+01 | 5.7E+00 | 13% | 2 | 1.3E+04 | 314 | 4.2E+06 |
| A | K | 3.0E+01 | 5.6E+00 | 19% | 2 | 1.1E+04 | 360 | 3.8E+06 |
| V | T | 6.8E+01 | 9.8E+00 | 14% | 2 | 1.6E+04 | 234 | 3.7E+06 |
| L | T | 5.4E+02 | 5.4E+01 | 10% | 2 | 4.4E+04 | 82 | 3.6E+06 |
| F | Q | 2.6E+02 | 1.8E+02 | 70% | 2 | 3.0E+04 | 117 | 3.5E+06 |
| L | R | 6.1E+02 | 2.8E+01 | 5% | 2 | 4.5E+04 | 74 | 3.3E+06 |
| M | V | 1.0E+02 | 2.2E+01 | 22% | 2 | 1.7E+04 | 167 | 2.8E+06 |
| V | W | 1.9E+02 | 5.4E+00 | 3% | 2 | 2.3E+04 | 122 | 2.8E+06 |
| L | I | 4.2E+02 | 6.9E+01 | 16% | 2 | 3.4E+04 | 80 | 2.7E+06 |
| L | Y | 1.6E+02 | 1.2E+01 | 7% | 2 | 2.1E+04 | 128 | 2.7E+06 |
| V | K | 3.8E+01 | 1.7E+00 | 5% | 2 | 9.9E+03 | 261 | 2.6E+06 |
| V | H | 6.7E+01 | 4.0E+00 | 6% | 2 | 1.3E+04 | 193 | 2.5E+06 |
| L | V | 3.6E+02 | 2.9E+01 | 8% | 2 | 3.0E+04 | 83 | 2.4E+06 |
| M | R | 4.9E+02 | 3.4E+01 | 7% | 2 | 3.5E+04 | 70 | 2.4E+06 |
| P | Y | 8.3E+01 | 1.0E+00 | 1% | 2 | 1.4E+04 | 168 | 2.3E+06 |
| L | F | 9.9E+01 | 9.8E+00 | 10% | 2 | 1.5E+04 | 151 | 2.3E+06 |
| A | V | 4.2E+01 | 5.4E+00 | 13% | 2 | 9.7E+03 | 230 | 2.2E+06 |
| V | V | 5.4E+01 | 5.4E+00 | 10% | 2 | 1.1E+04 | 203 | 2.2E+06 |
| W | G | 6.1E+01 | 1.3E+01 | 22% | 2 | 1.1E+04 | 188 | 2.1E+06 |
| M | F | 5.5E+01 | 9.6E+00 | 17% | 2 | 1.1E+04 | 195 | 2.1E+06 |
| V | Y | 6.1E+01 | 1.8E+00 | 3% | 2 | 1.1E+04 | 181 | 2.0E+06 |
| Y | T | 2.9E+01 | 5.3E+00 | 18% | 2 | 7.5E+03 | 263 | 2.0E+06 |
| L | Q | 1.2E+03 | 7.5E+01 | 6% | 2 | 4.9E+04 | 41 | 2.0E+06 |
| F | H | 1.5E+02 | 2.2E+01 | 15% | 2 | 1.7E+04 | 115 | 2.0E+06 |
| F | Y | 7.1E+01 | 8.3E+00 | 12% | 2 | 1.2E+04 | 164 | 1.9E+06 |
| F | F | 4.8E+01 | 1.4E+01 | 29% | 2 | 9.5E+03 | 200 | 1.9E+06 |
| F | G | 1.0E+02 | 1.0E+02 | 102% | 2 | 1.4E+04 | 134 | 1.8E+06 |
| I | R | 7.6E+02 | 4.0E+01 | 5% | 2 | 3.7E+04 | 49 | 1.8E+06 |
| V | Q | 2.5E+02 | 8.1E+00 | 3% | 2 | 2.1E+04 | 83 | 1.7E+06 |
| A | F | 2.2E+01 | 3.4E+00 | 15% | 2 | 5.9E+03 | 264 | 1.6E+06 |
| I | V | 3.6E+02 | 1.3E+02 | 37% | 2 | 2.4E+04 | 66 | 1.6E+06 |
| I | Y | 2.2E+02 | 1.6E+01 | 7% | 2 | 1.8E+04 | 81 | 1.5E+06 |
| M | I | 2.2E+02 | 2.6E+01 | 12% | 2 | 1.8E+04 | 81 | 1.4E+06 |
| V | I | 1.2E+02 | 2.9E+00 | 2% | 2 | 1.3E+04 | 108 | 1.4E+06 |
| I | I | 4.9E+02 | 7.1E+01 | 14% | 2 | 2.6E+04 | 53 | 1.4E+06 |
| L | W | 1.0E+03 | 1.2E+02 | 11% | 2 | 3.6E+04 | 36 | 1.3E+06 |
| I | F | 1.3E+02 | 2.8E+01 | 21% | 2 | 1.3E+04 | 99 | 1.3E+06 |
| V | F | 5.4E+01 | 7.3E+00 | 14% | 2 | 8.4E+03 | 155 | 1.3E+06 |
| M | Y | 1.1E+02 | 4.4E+01 | 39% | 2 | 1.2E+04 | 106 | 1.3E+06 |
| Y | Q | 6.0E+01 | 1.5E+01 | 26% | 2 | 8.6E+03 | 144 | 1.2E+06 |
| I | T | 8.4E+02 | 3.2E+01 | 4% | 2 | 3.2E+04 | 38 | 1.2E+06 |
| P | K | 7.4E+01 | 1.3E+01 | 17% | 2 | 9.4E+03 | 126 | 1.2E+06 |
| L | H | 5.4E+02 | 5.8E+01 | 11% | 2 | 2.5E+04 | 47 | 1.2E+06 |
| I | Q | 1.7E+03 | 1.9E+02 | 12% | 2 | 4.4E+04 | 27 | 1.2E+06 |
| P | F | 6.9E+01 | 6.2E+00 | 9% | 2 | 9.0E+03 | 129 | 1.2E+06 |
| R | P | 7.0E+00 | 2.5E+00 | 36% | 2 | 2.8E+03 | 405 | 1.1E+06 |
| M | Q | 9.5E+02 | 1.8E+01 | 2% | 2 | 3.3E+04 | 34 | 1.1E+06 |
| M | H | 2.9E+02 | 8.2E+01 | 28% | 2 | 1.8E+04 | 62 | 1.1E+06 |
| A | R | 3.5E+02 | 5.5E+01 | 16% | 2 | 2.0E+04 | 56 | 1.1E+06 |
| F | W | 3.7E+02 | 1.3E+02 | 35% | 2 | 2.0E+04 | 54 | 1.1E+06 |
| Y | S | 4.1E+01 | 2.3E+00 | 6% | 2 | 6.5E+03 | 158 | 1.0E+06 |
| Y | K | 2.5E+01 | 9.2E+00 | 37% | 2 | 5.0E+03 | 199 | 9.9E+05 |
| A | A | 4.5E+01 | 7.4E−01 | 2% | 2 | 6.2E+03 | 138 | 8.6E+05 |
| I | H | 8.1E+02 | 1.9E+01 | 2% | 2 | 2.6E+04 | 32 | 8.3E+05 |
| I | M | 2.1E+03 | 5.4E+02 | 26% | 2 | 4.1E+04 | 20 | 8.2E+05 |
| L | M | 2.7E+03 | 2.4E+02 | 9% | 2 | 4.7E+04 | 17 | 8.1E+05 |
| A | G | 1.4E+01 | 2.0E+00 | 14% | 2 | 3.4E+03 | 238 | 8.1E+05 |
| V | M | 2.8E+02 | 2.1E+01 | 8% | 2 | 1.5E+04 | 54 | 8.1E+05 |
| A | T | 3.3E+02 | n/a | n/a | 1 | 1.6E+04 | 49 | 7.9E+05 |
| M | M | 1.0E+03 | 2.7E+02 | 27% | 2 | 2.8E+04 | 27 | 7.6E+05 |
| Y | W | 5.4E+01 | 1.2E+01 | 23% | 2 | 6.4E+03 | 118 | 7.6E+05 |
| L | A | 2.3E+02 | 1.6E+01 | 7% | 2 | 1.3E+04 | 57 | 7.5E+05 |
| I | W | 1.5E+03 | 1.2E+00 | 0% | 2 | 3.3E+04 | 22 | 7.2E+05 |
| F | V | 7.1E+01 | 9.8E+00 | 14% | 2 | 7.1E+03 | 99 | 7.0E+05 |
| W | H | 4.2E+01 | 7.9E+00 | 19% | 2 | 5.4E+03 | 127 | 6.8E+05 |
| F | M | 8.4E+02 | 3.9E+01 | 5% | 2 | 2.4E+04 | 28 | 6.8E+05 |
| A | I | 2.2E+02 | 3.4E+01 | 16% | 2 | 1.2E+04 | 55 | 6.6E+05 |
| V | S | 8.8E+01 | 1.0E+01 | 11% | 2 | 7.6E+03 | 86 | 6.5E+05 |
| W | R | 8.0E+02 | 2.7E+01 | 3% | 2 | 2.3E+04 | 28 | 6.4E+05 |
| M | G | 5.4E+01 | 8.9E+00 | 16% | 2 | 5.9E+03 | 108 | 6.4E+05 |
| L | S | 6.9E+02 | 6.8E+01 | 10% | 2 | 2.1E+04 | 30 | 6.3E+05 |
| P | Q | 1.1E+03 | 2.3E+02 | 21% | 2 | 2.6E+04 | 23 | 6.2E+05 |
| P | V | 2.8E+02 | 4.8E+01 | 17% | 2 | 1.3E+04 | 47 | 6.1E+05 |
| F | A | 1.3E+02 | 1.6E+02 | 123% | 2 | 8.9E+03 | 68 | 6.1E+05 |
| V | R | 4.3E+02 | 1.8E+01 | 4% | 2 | 1.6E+04 | 37 | 6.0E+05 |
| M | S | 5.7E+02 | 4.2E+01 | 7% | 2 | 1.8E+04 | 33 | 6.0E+05 |
| P | H | 3.6E+02 | 6.9E+01 | 19% | 2 | 1.5E+04 | 41 | 5.9E+05 |
| Q | K | 4.9E+01 | 7.7E+00 | 16% | 2 | 5.3E+03 | 108 | 5.8E+05 |
| P | R | 5.0E+02 | 1.7E+01 | 3% | 2 | 1.7E+04 | 34 | 5.6E+05 |
| P | W | 1.3E+03 | 3.7E+01 | 3% | 2 | 2.7E+04 | 21 | 5.6E+05 |
| P | T | 8.4E+02 | 3.0E+01 | 4% | 2 | 2.2E+04 | 26 | 5.6E+05 |
| Y | H | 4.3E+01 | 5.7E+00 | 13% | 2 | 4.8E+03 | 114 | 5.5E+05 |
| P | I | 5.9E+02 | 4.5E+01 | 8% | 2 | 1.8E+04 | 30 | 5.4E+05 |
| V | G | 4.9E+01 | 1.3E+00 | 3% | 2 | 5.1E+03 | 103 | 5.2E+05 |
| P | G | 1.0E+02 | 9.9E+00 | 10% | 2 | 7.2E+03 | 71 | 5.1E+05 |
| F | S | 1.9E+02 | 2.5E+02 | 132% | 2 | 9.9E+03 | 51 | 5.1E+05 |
| M | W | 6.3E+02 | 3.4E+01 | 5% | 2 | 1.8E+04 | 28 | 5.0E+05 |
| A | W | 4.6E+02 | 3.8E+01 | 8% | 2 | 1.5E+04 | 32 | 4.7E+05 |
| L | G | 1.4E+02 | 3.5E+01 | 25% | 2 | 8.1E+03 | 58 | 4.7E+05 |
| Y | A | 4.9E+01 | 1.3E+00 | 3% | 2 | 4.8E+03 | 98 | 4.7E+05 |
| W | N | 2.2E+01 | 2.4E+00 | 11% | 2 | 3.2E+03 | 145 | 4.7E+05 |
| I | G | 1.7E+02 | 1.7E+01 | 10% | 2 | 8.6E+03 | 51 | 4.4E+05 |
| L | L | 5.9E+02 | 1.2E+01 | 2% | 2 | 1.6E+04 | 27 | 4.2E+05 |
| A | H | 1.4E+02 | 3.8E+01 | 27% | 2 | 7.4E+03 | 52 | 3.9E+05 |
| V | N | 7.0E+01 | 1.2E+01 | 17% | 2 | 5.2E+03 | 74 | 3.8E+05 |
| M | A | 3.6E+02 | 3.3E+01 | 9% | 2 | 1.2E+04 | 32 | 3.8E+05 |
| T | W | 2.1E+01 | 4.9E+00 | 24% | 2 | 2.7E+03 | 132 | 3.6E+05 |
| P | S | 4.2E+02 | 1.0E+01 | 2% | 2 | 1.2E+04 | 28 | 3.3E+05 |
| Y | G | 4.1E+01 | 5.6E+00 | 14% | 2 | 3.7E+03 | 88 | 3.2E+05 |
| A | Q | 4.6E+02 | 5.1E+01 | 11% | 2 | 1.2E+04 | 27 | 3.2E+05 |
| W | Y | 6.0E+01 | 8.6E+00 | 14% | 2 | 4.3E+03 | 73 | 3.2E+05 |
| F | I | 1.5E+02 | 2.0E+01 | 13% | 2 | 7.0E+03 | 45 | 3.2E+05 |
| I | S | 6.1E+02 | 2.6E+01 | 4% | 2 | 1.4E+04 | 23 | 3.1E+05 |
| I | L | 7.0E+02 | 1.0E+02 | 15% | 2 | 1.5E+04 | 21 | 3.1E+05 |
| Y | Y | 4.8E+01 | 3.1E+00 | 6% | 2 | 3.8E+03 | 79 | 3.0E+05 |
| P | A | 1.7E+02 | 6.7E+01 | 38% | 2 | 7.0E+03 | 40 | 2.8E+05 |
| V | A | 6.2E+01 | 2.8E+01 | 46% | 2 | 4.2E+03 | 67 | 2.8E+05 |
| L | E | 6.9E+02 | 1.6E+02 | 23% | 2 | 1.4E+04 | 20 | 2.8E+05 |
| V | E | 1.1E+02 | 8.0E+00 | 7% | 2 | 5.4E+03 | 50 | 2.7E+05 |
| A | S | 3.1E+02 | 7.1E+00 | 2% | 2 | 9.1E+03 | 29 | 2.7E+05 |
| W | M | 2.0E+02 | 2.3E+01 | 12% | 2 | 7.2E+03 | 37 | 2.6E+05 |
| M | P | 4.1E+00 | 1.2E+00 | 29% | 2 | 9.9E+02 | 241 | 2.4E+05 |
| F | E | 1.4E+02 | 4.6E+01 | 33% | 2 | 5.6E+03 | 40 | 2.2E+05 |
| M | L | 5.3E+02 | 2.4E+01 | 5% | 2 | 1.1E+04 | 20 | 2.2E+05 |
| I | P | 8.5E+00 | 8.1E−01 | 9% | 2 | 1.3E+03 | 157 | 2.1E+05 |
| Y | F | 3.4E+01 | 2.0E+00 | 6% | 2 | 2.6E+03 | 77 | 2.0E+05 |
| A | N | 7.8E+01 | 8.5E+00 | 11% | 2 | 4.0E+03 | 51 | 2.0E+05 |
| W | W | 7.0E+01 | 9.2E+00 | 13% | 2 | 3.8E+03 | 54 | 2.0E+05 |
| D | H | 5.0E+00 | 1.8E−02 | 0% | 2 | 1.0E+03 | 200 | 2.0E+05 |
| L | N | 9.4E+02 | 7.4E+01 | 8% | 2 | 1.4E+04 | 14 | 2.0E+05 |
| P | M | 9.9E+02 | 7.4E+01 | 7% | 2 | 1.4E+04 | 14 | 1.9E+05 |
| F | N | 2.0E+02 | 1.6E+02 | 81% | 2 | 6.2E+03 | 31 | 1.9E+05 |
| W | E | 2.4E+01 | 5.5E+00 | 23% | 2 | 2.1E+03 | 89 | 1.9E+05 |
| W | V | 8.6E+01 | 1.2E+00 | 1% | 2 | 3.9E+03 | 46 | 1.8E+05 |
| P | L | 3.3E+02 | 4.0E+01 | 12% | 2 | 7.7E+03 | 23 | 1.8E+05 |
| A | M | 4.6E+02 | 1.4E+02 | 31% | 2 | 9.0E+03 | 20 | 1.8E+05 |
| F | L | 5.3E+02 | 1.6E+02 | 30% | 2 | 9.5E+03 | 18 | 1.7E+05 |
| M | N | 4.3E+02 | 1.8E+01 | 4% | 2 | 8.3E+03 | 19 | 1.6E+05 |
| H | H | 2.5E+01 | 3.7E+00 | 15% | 2 | 2.0E+03 | 78 | 1.5E+05 |
| Y | R | 6.1E+02 | 1.8E+02 | 29% | 2 | 9.5E+03 | 16 | 1.5E+05 |
| T | R | 3.7E+01 | 5.2E+01 | 141% | 2 | 2.3E+03 | 63 | 1.4E+05 |
| Q | R | 6.6E+02 | 2.4E+01 | 4% | 2 | 9.6E+03 | 15 | 1.4E+05 |
| A | L | 3.0E+02 | 6.5E+01 | 22% | 2 | 6.3E+03 | 21 | 1.3E+05 |
| G | T | 5.9E+01 | 1.3E+01 | 22% | 2 | 2.7E+03 | 46 | 1.3E+05 |
| T | H | 1.4E+01 | 9.1E−01 | 7% | 2 | 1.3E+03 | 95 | 1.2E+05 |
| T | M | 1.3E+01 | 1.8E+01 | 141% | 2 | 1.2E+03 | 99 | 1.2E+05 |
| I | N | 8.7E+02 | 8.6E+01 | 10% | 2 | 1.0E+04 | 12 | 1.2E+05 |
| W | F | 4.9E+01 | 7.6E+00 | 15% | 2 | 2.4E+03 | 49 | 1.2E+05 |
| I | A | 6.5E+02 | 4.0E+02 | 62% | 2 | 8.7E+03 | 14 | 1.2E+05 |
| T | Q | 1.7E+01 | 6.4E+00 | 38% | 2 | 1.4E+03 | 82 | 1.2E+05 |
| Y | M | 1.6E+02 | 1.5E+02 | 98% | 2 | 4.3E+03 | 27 | 1.2E+05 |
| Q | Y | 2.0E+02 | 1.1E+01 | 5% | 2 | 4.7E+03 | 23 | 1.1E+05 |
| G | W | 8.2E+01 | 7.0E+00 | 8% | 2 | 2.9E+03 | 36 | 1.0E+05 |
| I | E | 1.3E+03 | 9.8E+01 | 7% | 2 | 1.2E+04 | 9 | 1.0E+05 |
| Q | I | 6.3E+02 | 9.1E+01 | 15% | 2 | 7.9E+03 | 13 | 9.8E+04 |
| Q | H | 5.5E+02 | 1.8E+01 | 3% | 2 | 7.3E+03 | 13 | 9.7E+04 |
| Y | N | 5.0E+01 | 6.8E+00 | 14% | 2 | 2.2E+03 | 44 | 9.6E+04 |
| T | T | 1.7E+01 | 9.4E+00 | 54% | 2 | 1.3E+03 | 74 | 9.4E+04 |
| T | D | 1.1E+01 | 8.9E−01 | 8% | 2 | 1.0E+03 | 91 | 9.3E+04 |
| S | K | 1.3E+01 | 1.1E+00 | 9% | 2 | 1.1E+03 | 85 | 9.3E+04 |
| T | K | 1.4E+01 | 1.9E−01 | 1% | 2 | 1.1E+03 | 81 | 9.1E+04 |
| Q | F | 1.5E+02 | 1.9E+01 | 13% | 2 | 3.6E+03 | 25 | 9.1E+04 |
| S | Y | 1.3E+01 | 4.4E+00 | 34% | 2 | 1.1E+03 | 82 | 8.7E+04 |
| F | P | 6.2E+00 | 2.4E+00 | 39% | 2 | 7.3E+02 | 118 | 8.6E+04 |
| T | Y | 2.3E+01 | 5.3E+00 | 23% | 2 | 1.4E+03 | 60 | 8.3E+04 |
| W | D | 1.6E+01 | 7.7E−01 | 5% | 2 | 1.2E+03 | 71 | 8.2E+04 |
| H | P | 7.0E+00 | 1.5E+00 | 21% | 2 | 7.4E+02 | 106 | 7.9E+04 |
| A | D | 5.6E+01 | 2.5E+01 | 45% | 2 | 2.1E+03 | 37 | 7.8E+04 |
| P | N | 5.8E+02 | 3.4E+01 | 6% | 2 | 6.7E+03 | 12 | 7.7E+04 |
| M | E | 6.0E+02 | 5.0E+01 | 8% | 2 | 6.8E+03 | 11 | 7.6E+04 |
| V | L | 3.3E+02 | 2.2E+01 | 7% | 2 | 5.0E+03 | 15 | 7.5E+04 |
| Q | Q | 1.4E+03 | 7.6E+01 | 5% | 2 | 1.0E+04 | 7 | 7.3E+04 |
| Q | V | 4.3E+02 | 1.6E+02 | 37% | 2 | 5.4E+03 | 13 | 6.8E+04 |
| Y | I | 6.6E+01 | 2.1E+01 | 31% | 2 | 2.1E+03 | 31 | 6.4E+04 |
| S | T | 3.2E+01 | 2.2E+00 | 7% | 2 | 1.4E+03 | 45 | 6.4E+04 |
| G | Y | 3.4E+01 | 1.2E+00 | 4% | 2 | 1.5E+03 | 43 | 6.3E+04 |
| Y | V | 4.9E+01 | 6.3E+00 | 13% | 2 | 1.7E+03 | 35 | 6.2E+04 |
| E | H | 7.7E+00 | 5.9E−01 | 8% | 2 | 6.9E+02 | 89 | 6.2E+04 |
| A | E | 1.8E+02 | 3.4E+00 | 2% | 2 | 3.3E+03 | 18 | 6.0E+04 |
| Q | T | 9.2E+02 | 1.5E+02 | 17% | 2 | 7.4E+03 | 8 | 5.9E+04 |
| K | D | 4.5E+01 | 2.8E+00 | 6% | 2 | 1.6E+03 | 36 | 5.9E+04 |
| G | R | 1.3E+02 | 4.3E+01 | 34% | 2 | 2.7E+03 | 21 | 5.6E+04 |
| S | W | 4.3E+01 | 2.9E+00 | 7% | 2 | 1.5E+03 | 36 | 5.5E+04 |
| P | E | 1.0E+03 | 1.4E+01 | 1% | 2 | 7.5E+03 | 7 | 5.4E+04 |
| E | F | 1.4E+01 | 1.2E+00 | 8% | 2 | 8.7E+02 | 63 | 5.4E+04 |
| E | K | 7.9E+00 | 3.5E−01 | 4% | 2 | 6.5E+02 | 83 | 5.4E+04 |
| S | D | 1.0E+01 | 1.4E+00 | 14% | 2 | 7.4E+02 | 72 | 5.3E+04 |
| P | P | 1.4E+01 | 3.2E+00 | 24% | 2 | 8.5E+02 | 63 | 5.3E+04 |
| S | F | 1.7E+01 | 4.2E+00 | 26% | 2 | 9.4E+02 | 57 | 5.3E+04 |
| N | T | 1.5E+01 | 4.0E+00 | 27% | 2 | 8.7E+02 | 60 | 5.2E+04 |
| Y | E | 5.4E+01 | 3.2E+00 | 6% | 2 | 1.7E+03 | 31 | 5.1E+04 |
| H | K | 2.8E+01 | 1.5E+01 | 55% | 2 | 1.2E+03 | 43 | 5.0E+04 |
| T | S | 1.6E+01 | 5.8E+00 | 37% | 2 | 8.9E+02 | 56 | 5.0E+04 |
| T | V | 2.0E+01 | 1.3E+01 | 66% | 2 | 9.8E+02 | 50 | 4.9E+04 |
| S | H | 2.4E+01 | 3.9E+00 | 17% | 2 | 1.1E+03 | 44 | 4.7E+04 |
| H | T | 5.0E+01 | 4.5E+00 | 9% | 2 | 1.5E+03 | 30 | 4.6E+04 |
| G | K | 3.4E+01 | 2.8E+00 | 8% | 2 | 1.2E+03 | 37 | 4.5E+04 |
| Q | W | 1.4E+03 | 6.3E+01 | 5% | 2 | 7.8E+03 | 6 | 4.4E+04 |
| N | F | 1.4E+01 | 1.8E+00 | 13% | 2 | 7.8E+02 | 56 | 4.3E+04 |
| G | G | 1.6E+01 | 2.9E−01 | 2% | 2 | 8.2E+02 | 51 | 4.2E+04 |
| N | K | 1.4E+01 | 4.1E−01 | 3% | 2 | 7.5E+02 | 55 | 4.1E+04 |
| N | Y | 1.5E+01 | 2.8E+00 | 18% | 2 | 7.8E+02 | 52 | 4.1E+04 |
| S | R | 1.3E+02 | 7.2E+01 | 55% | 2 | 2.3E+03 | 18 | 4.0E+04 |
| H | Y | 4.1E+01 | 9.4E+00 | 23% | 2 | 1.3E+03 | 31 | 3.9E+04 |
| G | F | 3.5E+01 | 1.3E+01 | 36% | 2 | 1.2E+03 | 33 | 3.8E+04 |
| E | A | 4.3E+00 | 1.9E−01 | 4% | 2 | 4.0E+02 | 92 | 3.7E+04 |
| D | F | 1.1E+01 | 1.5E+00 | 14% | 2 | 6.0E+02 | 57 | 3.4E+04 |
| G | S | 4.9E+01 | 1.0E+01 | 20% | 2 | 1.3E+03 | 26 | 3.4E+04 |
| G | V | 4.0E+01 | 6.2E−01 | 2% | 2 | 1.2E+03 | 29 | 3.3E+04 |
| S | A | 1.9E+01 | 7.9E−02 | 0% | 2 | 7.9E+02 | 41 | 3.3E+04 |
| T | E | 1.5E+01 | 4.7E−01 | 3% | 2 | 7.0E+02 | 47 | 3.3E+04 |
| H | R | 1.4E+02 | 8.9E+01 | 62% | 2 | 2.2E+03 | 15 | 3.2E+04 |
| S | Q | 4.5E+01 | 2.7E+00 | 6% | 2 | 1.2E+03 | 27 | 3.2E+04 |
| Q | M | 2.2E+03 | 1.2E+02 | 5% | 2 | 8.1E+03 | 4 | 3.1E+04 |
| T | G | 2.1E+01 | 1.0E+00 | 5% | 2 | 7.7E+02 | 37 | 2.9E+04 |
| N | H | 1.5E+01 | 4.2E+00 | 28% | 2 | 6.6E+02 | 43 | 2.8E+04 |
| T | N | 1.3E+01 | 1.0E−03 | 0% | 2 | 6.0E+02 | 46 | 2.8E+04 |
| N | G | 9.2E+00 | 4.5E−01 | 5% | 2 | 5.0E+02 | 55 | 2.8E+04 |
| G | M | 5.2E+01 | 2.3E+00 | 5% | 2 | 1.2E+03 | 23 | 2.8E+04 |
| S | S | 4.0E+01 | 2.0E+00 | 5% | 2 | 1.0E+03 | 26 | 2.7E+04 |
| H | S | 6.0E+01 | 8.6E+00 | 14% | 2 | 1.3E+03 | 21 | 2.7E+04 |
| F | D | 6.3E+01 | 8.0E−01 | 1% | 2 | 1.3E+03 | 21 | 2.7E+04 |
| Q | L | 4.8E+02 | 1.9E+01 | 4% | 2 | 3.5E+03 | 7 | 2.5E+04 |
| H | F | 4.2E+01 | 2.6E+00 | 6% | 2 | 1.0E+03 | 25 | 2.5E+04 |
| H | W | 3.2E+02 | 4.6E+01 | 14% | 2 | 2.8E+03 | 9 | 2.5E+04 |
| G | H | 5.8E+01 | 7.1E−01 | 1% | 2 | 1.2E+03 | 21 | 2.5E+04 |
| S | G | 2.4E+01 | 8.1E−01 | 3% | 2 | 7.7E+02 | 32 | 2.5E+04 |
| N | S | 1.6E+01 | 1.5E+00 | 9% | 2 | 6.4E+02 | 39 | 2.5E+04 |
| G | P | 7.5E+00 | 1.4E+00 | 19% | 2 | 4.3E+02 | 57 | 2.4E+04 |
| T | I | 6.3E+01 | 5.7E+01 | 90% | 2 | 1.2E+03 | 19 | 2.2E+04 |
| H | G | 4.7E+01 | 6.8E+00 | 15% | 2 | 1.0E+03 | 22 | 2.2E+04 |
| Y | D | 3.6E+01 | 2.4E+00 | 6% | 2 | 8.9E+02 | 24 | 2.2E+04 |
| N | Q | 2.7E+01 | 1.0E+00 | 4% | 2 | 7.4E+02 | 28 | 2.1E+04 |
| S | V | 3.8E+01 | 1.3E+00 | 3% | 2 | 8.9E+02 | 23 | 2.1E+04 |
| S | I | 5.5E+01 | 1.6E+01 | 30% | 2 | 1.1E+03 | 19 | 2.1E+04 |
| D | G | 5.8E+00 | 6.3E−01 | 11% | 2 | 3.5E+02 | 59 | 2.1E+04 |
| T | A | 2.0E+01 | 5.7E−01 | 3% | 2 | 6.3E+02 | 32 | 2.0E+04 |
| G | Q | 9.4E+01 | 2.5E+01 | 27% | 2 | 1.4E+03 | 15 | 2.0E+04 |
| S | M | 4.6E+01 | 3.4E+00 | 7% | 2 | 9.6E+02 | 21 | 2.0E+04 |
| H | Q | 1.6E+02 | 9.8E+00 | 6% | 2 | 1.8E+03 | 11 | 2.0E+04 |
| N | M | 2.7E+01 | 7.5E−01 | 3% | 2 | 7.2E+02 | 27 | 1.9E+04 |
| W | I | 1.8E+02 | 1.9E+01 | 10% | 2 | 1.9E+03 | 10 | 1.9E+04 |
| E | T | 7.9E+00 | 6.8E−01 | 9% | 2 | 3.9E+02 | 49 | 1.9E+04 |
| G | I | 8.8E+01 | 8.8E+00 | 10% | 2 | 1.3E+03 | 15 | 1.9E+04 |
| T | F | 2.2E+01 | 8.4E+00 | 38% | 2 | 6.4E+02 | 29 | 1.9E+04 |
| E | W | 8.0E+00 | 1.2E+00 | 15% | 2 | 3.9E+02 | 48 | 1.9E+04 |
| G | A | 5.0E+01 | 2.3E+00 | 5% | 2 | 9.5E+02 | 19 | 1.8E+04 |
| N | V | 1.7E+01 | 1.0E+00 | 6% | 2 | 5.5E+02 | 32 | 1.8E+04 |
| H | A | 5.3E+01 | 5.7E+00 | 11% | 2 | 9.6E+02 | 18 | 1.7E+04 |
| V | D | 7.0E+01 | 5.1E+00 | 7% | 2 | 1.1E+03 | 16 | 1.7E+04 |
| K | F | 3.5E+01 | 3.9E+00 | 11% | 2 | 7.5E+02 | 22 | 1.6E+04 |
| S | P | 1.3E+01 | 2.9E+00 | 23% | 2 | 4.5E+02 | 36 | 1.6E+04 |
| D | Y | 1.1E+01 | 6.3E−01 | 6% | 2 | 4.1E+02 | 39 | 1.6E+04 |
| K | I | 6.2E+01 | 3.5E+00 | 6% | 2 | 9.9E+02 | 16 | 1.6E+04 |
| N | W | 8.6E+01 | 2.7E+01 | 32% | 2 | 1.2E+03 | 13 | 1.6E+04 |
| K | H | 5.6E+01 | 2.1E+01 | 38% | 2 | 9.0E+02 | 16 | 1.4E+04 |
| G | L | 7.8E+01 | 1.3E+01 | 16% | 2 | 1.1E+03 | 14 | 1.4E+04 |
| D | V | 1.5E+01 | 7.7E−01 | 5% | 2 | 4.6E+02 | 30 | 1.3E+04 |
| K | Y | 3.8E+01 | 7.6E+00 | 20% | 2 | 7.0E+02 | 19 | 1.3E+04 |
| Y | L | 3.4E+02 | 3.0E+02 | 89% | 2 | 2.1E+03 | 6 | 1.3E+04 |
| E | Y | 1.5E+01 | 3.1E+00 | 21% | 2 | 4.3E+02 | 29 | 1.2E+04 |
| D | Q | 2.2E+00 | 3.1E+00 | 141% | 2 | 1.6E+02 | 75 | 1.2E+04 |
| S | N | 2.4E+01 | 2.5E+00 | 10% | 2 | 5.4E+02 | 23 | 1.2E+04 |
| K | K | 2.5E+01 | 5.1E+00 | 21% | 2 | 5.2E+02 | 21 | 1.1E+04 |
| N | I | 3.8E+01 | 1.5E+01 | 40% | 2 | 6.4E+02 | 17 | 1.1E+04 |
| N | A | 1.7E+01 | 2.3E+00 | 13% | 2 | 4.3E+02 | 25 | 1.1E+04 |
| Q | S | 9.5E+02 | 1.2E+02 | 13% | 2 | 3.1E+03 | 3 | 1.0E+04 |
| L | D | 1.0E+03 | 4.1E+02 | 40% | 2 | 3.1E+03 | 3 | 9.6E+03 |
| N | R | 2.2E+02 | 8.7E+00 | 4% | 2 | 1.4E+03 | 7 | 9.5E+03 |
| G | N | 5.2E+01 | 6.8E+00 | 13% | 2 | 7.0E+02 | 14 | 9.5E+03 |
| D | T | 6.4E+00 | 3.8E−01 | 6% | 2 | 2.5E+02 | 38 | 9.5E+03 |
| K | W | 1.3E+02 | 4.1E+01 | 30% | 2 | 1.1E+03 | 8 | 9.4E+03 |
| T | P | 7.2E+01 | 9.4E+01 | 130% | 2 | 8.2E+02 | 11 | 9.3E+03 |
| R | D | 1.4E+03 | 2.3E+02 | 16% | 2 | 3.6E+03 | 3 | 9.1E+03 |
| H | N | 7.1E+01 | 6.3E+00 | 9% | 2 | 8.0E+02 | 11 | 9.0E+03 |
| K | L | 8.9E+01 | 1.7E+01 | 20% | 2 | 8.8E+02 | 10 | 8.7E+03 |
| H | I | 7.8E+01 | 2.1E+01 | 26% | 2 | 8.2E+02 | 10 | 8.6E+03 |
| Q | A | 4.1E+02 | 1.9E+02 | 46% | 2 | 1.8E+03 | 5 | 8.3E+03 |
| Q | G | 1.4E+02 | 4.0E+01 | 28% | 2 | 1.1E+03 | 7 | 7.8E+03 |
| S | L | 8.2E+01 | 2.5E+00 | 3% | 2 | 7.9E+02 | 10 | 7.7E+03 |
| Y | P | 2.0E+01 | 9.3E−01 | 5% | 2 | 3.8E+02 | 19 | 7.4E+03 |
| H | V | 3.9E+01 | 9.9E−01 | 3% | 2 | 5.4E+02 | 14 | 7.4E+03 |
| W | L | 4.6E+02 | 4.5E+01 | 10% | 2 | 1.8E+03 | 4 | 7.1E+03 |
| K | V | 5.0E+01 | 1.9E+00 | 4% | 2 | 5.9E+02 | 12 | 7.0E+03 |
| S | E | 2.2E+01 | 2.1E+00 | 9% | 2 | 3.9E+02 | 17 | 6.8E+03 |
| K | R | 9.1E+01 | 1.0E+01 | 11% | 2 | 7.8E+02 | 9 | 6.7E+03 |
| Q | N | 6.1E+02 | 3.1E+01 | 5% | 2 | 2.0E+03 | 3 | 6.3E+03 |
| K | G | 3.3E+01 | 5.6E−02 | 0% | 2 | 4.6E+02 | 14 | 6.2E+03 |
| H | M | 2.7E+02 | 6.3E+00 | 2% | 2 | 1.3E+03 | 5 | 6.0E+03 |
| N | N | 1.5E+01 | 4.1E−01 | 3% | 2 | 2.9E+02 | 19 | 5.5E+03 |
| M | D | 5.0E+02 | 6.3E+01 | 12% | 2 | 1.6E+03 | 3 | 5.2E+03 |
| K | T | 7.2E+01 | 6.8E+00 | 9% | 2 | 6.1E+02 | 8 | 5.1E+03 |
| P | D | 7.9E+02 | 3.4E+01 | 4% | 2 | 2.0E+03 | 2 | 4.9E+03 |
| E | S | 5.3E+00 | 1.4E+00 | 26% | 2 | 1.6E+02 | 30 | 4.7E+03 |
| K | M | 1.4E+02 | 7.3E+01 | 52% | 2 | 8.0E+02 | 6 | 4.5E+03 |
| T | L | 1.4E+02 | 1.1E+02 | 79% | 2 | 7.5E+02 | 6 | 4.1E+03 |
| E | R | 3.0E+02 | 2.7E+00 | 1% | 2 | 1.1E+03 | 4 | 4.1E+03 |
| G | D | 7.3E+01 | 1.6E+01 | 21% | 2 | 5.4E+02 | 7 | 4.0E+03 |
| K | Q | 1.0E+02 | 1.1E+01 | 11% | 2 | 6.4E+02 | 6 | 3.9E+03 |
| E | I | 5.5E+01 | 3.2E+01 | 59% | 2 | 4.6E+02 | 8 | 3.9E+03 |
| N | L | 1.1E+02 | 2.2E+01 | 20% | 2 | 6.5E+02 | 6 | 3.9E+03 |
| Q | E | 9.2E+02 | 2.4E+02 | 26% | 2 | 1.8E+03 | 2 | 3.6E+03 |
| G | E | 8.7E+01 | 1.8E+01 | 21% | 2 | 5.1E+02 | 6 | 3.0E+03 |
| I | D | 1.3E+03 | 6.0E+01 | 5% | 2 | 2.0E+03 | 1 | 3.0E+03 |
| H | D | 8.6E+01 | 5.7E−01 | 1% | 2 | 4.9E+02 | 6 | 2.8E+03 |
| K | S | 8.4E+01 | 9.6E−01 | 1% | 2 | 4.7E+02 | 6 | 2.6E+03 |
| K | A | 5.2E+01 | 2.2E+01 | 42% | 2 | 3.6E+02 | 7 | 2.5E+03 |
| K | N | 6.4E+01 | 1.3E+01 | 21% | 2 | 3.7E+02 | 6 | 2.1E+03 |
| E | M | 1.3E+01 | 6.1E−01 | 5% | 2 | 1.5E+02 | 12 | 1.9E+03 |
| E | V | 2.4E+01 | 1.7E−01 | 1% | 2 | 2.0E+02 | 9 | 1.8E+03 |
| D | M | 1.1E+01 | 1.8E+00 | 16% | 2 | 1.4E+02 | 12 | 1.7E+03 |
| D | L | 2.7E+01 | 1.4E+01 | 51% | 2 | 2.1E+02 | 8 | 1.6E+03 |
| H | L | 1.4E+02 | 1.0E+02 | 73% | 2 | 4.7E+02 | 3 | 1.6E+03 |
| V | P | 6.3E+00 | 1.7E+00 | 27% | 2 | 9.5E+01 | 15 | 1.4E+03 |
| R | I | 7.0E+02 | 3.4E+01 | 5% | 2 | 1.0E+03 | 1 | 1.4E+03 |
| R | G | 6.8E+02 | 6.1E+01 | 9% | 2 | 8.8E+02 | 1 | 1.2E+03 |
| K | E | 6.2E+01 | 2.8E+01 | 45% | 2 | 2.7E+02 | 4 | 1.2E+03 |
| N | E | 2.0E+01 | 5.1E−01 | 3% | 2 | 1.5E+02 | 7 | 1.1E+03 |
| R | R | 9.0E+02 | 1.7E+02 | 19% | 2 | 9.8E+02 | 1 | 1.1E+03 |
| E | Q | 1.1E+01 | 1.6E+00 | 14% | 2 | 1.1E+02 | 10 | 1.0E+03 |
| R | F | 7.3E+02 | 9.7E+01 | 13% | 2 | 7.7E+02 | 1 | 8.0E+02 |
| R | W | 3.0E+03 | 4.3E+02 | 14% | 2 | 1.5E+03 | 0 | 7.0E+02 |
| R | V | 5.1E+02 | 2.5E+02 | 49% | 2 | 5.9E+02 | 1 | 6.7E+02 |
| D | R | 1.9E+02 | 6.2E+00 | 3% | 2 | 3.4E+02 | 2 | 6.2E+02 |
| R | L | 1.4E+03 | 2.4E+02 | 18% | 2 | 9.2E+02 | 1 | 6.1E+02 |
| H | E | 9.6E+01 | 6.3E+00 | 7% | 2 | 2.3E+02 | 2 | 5.5E+02 |
| R | K | 6.4E+02 | 8.3E+01 | 13% | 2 | 5.9E+02 | 1 | 5.5E+02 |
| E | G | 1.8E+01 | 6.6E+00 | 36% | 2 | 9.8E+01 | 5 | 5.3E+02 |
| R | Y | 9.6E+02 | 1.1E+02 | 12% | 2 | 6.9E+02 | 1 | 5.0E+02 |
| E | L | 1.0E+02 | 9.3E+00 | 9% | 2 | 2.1E+02 | 2 | 4.2E+02 |
| Q | D | 6.8E+02 | 1.2E+01 | 2% | 2 | 5.0E+02 | 1 | 3.6E+02 |
| R | H | 2.6E+03 | 5.6E+02 | 21% | 2 | 9.6E+02 | 0 | 3.5E+02 |
| R | E | 2.4E+03 | 5.2E+02 | 22% | 2 | 8.7E+02 | 0 | 3.1E+02 |
| R | T | 1.5E+03 | 6.9E+01 | 5% | 2 | 6.4E+02 | 0 | 2.8E+02 |
| R | N | 1.7E+03 | 1.8E+02 | 11% | 2 | 6.7E+02 | 0 | 2.6E+02 |
| R | A | 2.0E+03 | 2.7E+02 | 14% | 2 | 6.7E+02 | 0 | 2.2E+02 |
| R | S | 2.7E+03 | 1.4E+02 | 5% | 2 | 6.6E+02 | 0 | 1.6E+02 |
| R | M | 4.6E+03 | 1.6E+03 | 35% | 2 | 7.9E+02 | 0 | 1.4E+02 |
| R | Q | 4.5E+03 | 3.9E+02 | 9% | 2 | 6.4E+02 | 0 | 9.1E+01 |
| E | N | 3.3E+00 | 3.3E−01 | 10% | 2 | 1.7E+01 | 5 | 8.8E+01 |
| L | P | 1.6E+00 | 2.3E+00 | 141% | 2 | 1.1E+01 | 7 | 7.5E+01 |
| D | S | 4.4E+00 | 6.8E−02 | 2% | 2 | 1.5E+01 | 3 | 4.9E+01 |
| D | W | 7.2E+00 | 1.9E+00 | 27% | 2 | 1.4E+01 | 2 | 2.8E+01 |
| N | P | 2.9E+00 | 1.1E−01 | 4% | 2 | 9.0E+00 | 3 | 2.7E+01 |
| D | I | 4.1E+01 | 4.0E+00 | 10% | 2 | 3.0E+01 | 1 | 2.2E+01 |
| D | K | 1.1E+01 | 1.8E+00 | 17% | 2 | 1.0E+01 | 1 | 9.9E+00 |
| N | D | 3.0E+01 | 2.1E+01 | 70% | 2 | 3.0E+00 | 0 | 3.0E−01 |
| D | P | 1.6E+00 | 8.7E−01 | 55% | 2 | 6.6E−04 | 0 | 2.8E−07 |
| K | P | 8.7E+00 | 1.5E+00 | 18% | 2 | 5.6E−04 | 0 | 3.6E−08 |
| Q | P | 9.5E+00 | 2.6E+00 | 28% | 2 | 0.0E+00 | 0 | 0.0E+00 |

TABLE 5
Rationally Designed (Natural Sequence) Quenched Fluorescence Library

| | | | | | | | | | | | FXa | | | FIIa | Specificity | Functional Selectivity |
|---|---|---|---|---|---|---|---|---|---|---|---|---|---|---|---|---|
| Natural | | | | | | | | | | | k_{cat}/K_{M} | | | k_{cat}/K_{M} | Ratio | (Specificity*FIIa |
| Substrate | X₁₀ | X₉ | X₈ | X₇ | X₆ | X₅ | X₄ | X₃ | X₂ | X₁ | (M⁻¹s⁻¹) | % CV | n | (M⁻¹s⁻¹) | (FIIa/FXa) | k_{cat}/K_{M}) |
| FpA_P | D | F | L | A | E | G | G | G | P | R | 5.8E+00 | 31% | 3 | 4.0E+04 | 6914 | 2.8E+08 |
| Factor XI | N | E | S | T | T | K | I | K | P | R | 3.6E+01 | 20% | 3 | 2.0E+04 | 559 | 1.1E+07 |
| Factor V (2) | H | T | H | H | A | P | L | S | P | R | 1.0E+02 | 3% | 3 | 3.1E+04 | 302 | 9.5E+06 |
| Thrombin (3) | S | E | Y | Q | T | F | F | N | P | R | 1.4E+02 | 58% | 3 | 2.0E+04 | 141 | 2.8E+06 |
| Thrombin (1) | D | Q | V | T | V | A | M | T | P | R | 4.7E+02 | 13% | 3 | 3.0E+04 | 64 | 1.9E+06 |
| Factor XIII | T | V | E | L | Q | G | V | V | P | R | 1.0E+02 | 11% | 3 | 1.2E+04 | 114 | 1.3E+06 |
| PAR4 | S | T | P | S | I | L | P | A | P | R | 2.3E+02 | 11% | 3 | 9.4E+03 | 40 | 3.8E+05 |
| Protein C | E | D | Q | E | D | Q | V | D | P | R | 1.3E+01 | 5% | 3 | 1.8E+03 | 133 | 2.4E+05 |
| Factor VIII (2) | L | S | K | N | N | A | I | E | P | R | 1.0E+03 | 6% | 3 | 1.3E+04 | 13 | 1.7E+05 |
| Osteopontin | R | G | D | S | V | V | Y | G | L | R | 1.7E+00 | 87% | 3 | 4.1E+02 | 239 | 9.8E+04 |
| TAFI | Q | I | S | N | D | T | V | S | P | R | 3.4E+02 | 30% | 3 | 5.3E+03 | 16 | 8.3E+04 |
| FpA | D | F | L | A | E | G | G | G | V | R | 3.4E+00 | 2% | 3 | 4.1E+02 | 121 | 4.9E+04 |
| PAR1 (2) | — | — | T | N | A | T | L | D | P | R | 8.6E+02 | 1% | 3 | 3.6E+03 | 4 | 1.5E+04 |
| PAR1 (3) | — | — | — | — | A | T | L | D | P | R | 9.4E+02 | 8% | 3 | 3.3E+03 | 4 | 1.2E+04 |
| Factor VIII (3) | Y | D | E | D | E | N | Q | S | P | R | 3.2E+02 | 18% | 3 | 9.3E+02 | 3 | 2.7E+03 |
| Factor V (1) | N | R | L | A | A | A | L | G | I | R | 3.5E+02 | 79% | 3 | 7.2E+02 | 2 | 1.5E+03 |
| Factor V (3) | P | D | N | I | A | A | W | Y | L | R | 1.5E+01 | 57% | 3 | 9.8E+01 | 7 | 6.6E+02 |
| FpB | D | N | E | E | G | F | F | S | A | R | 2.3E+02 | 5% | 3 | 3.0E+02 | 1 | 3.9E+02 |
| PAR3 | N | L | A | K | P | T | L | P | I | K | 3.0E+00 | 5% | 3 | 1.6E+01 | 5 | 8.8E+01 |
| Antithrombin | A | S | T | A | V | V | I | A | G | R | 2.1E+00 | 51% | 3 | 3.1E−01 | 0 | 4.5E−02 |
| Thrombin (2) | E | D | S | D | R | A | I | E | G | R | 1.9E+03 | 10% | 3 | 0.0E+00 | 0 | 0.0E+00 |

### Example 5

### Screening the Thrombin Sensitive FX Molecules to Evaluate the Kinetic Rate Constant for Activation by Thrombin, FXa and FVIIa

[0375] In order to determine the activation rates for engineered thrombin sensitive FX molecules, a progress curve protocol will be used for evaluating the kinetics of activation by thrombin, FXa and FVIIa. The progress curve method assumes that the reaction follows a simple Michaelis Menten mechanism with the encounter complex of substrate (e.g. FX molecule) and enzyme (e.g. the activating protease) being limiting (i.e. psuedo-1^{st}-order). Under conditions where [FX molecules]<<K_{M} this method allows for an estimation of the k_{cat}/K_{M} from an exponential fit of the complete reaction progress curves (i.e. complete FX activation over time). The method will be carried out essentially as described by Louvain-Quintard et al. ((2005) JBC, 280: 41352-41359) with minor modifications. Briefly, thrombin sensitive FX molecules (˜10-50 nM) will be diluted in assay buffer (50 mM Hepes, 150 mM NaCl, 10 mM CaCl₂, 0.1% PEG8000, 0.1% BSA, pH 7.4) at 37° C. Activation reactions will be triggered by the addition of human α-thrombin to a final concentration of 2-5 nM. At timed intervals, samples will be removed and quenched with excess hirudin (100-200 nM) for thrombin reactions, EDTA for FVIIa reactions or ecotin, a specific FXa inhibitor, in slight excess for FXa reactions. The progress of FX activation to FXa will be followed by measuring the FXa activity of the quenched samples using a specific fluorogenic FXa substrate, Pefafluor Xa (Pentapharm, Switzerland), and by comparison to a standard curve of known amounts of FXa. Progress curves will be fit to the following equation:

Y=FXa₀+FXaₘₐₓ*(1−exp(−E*k*x))

where x=reaction time, FXa₀=the initial amount of FXa in the sample (if any), FXaₘₐₓ=the maximum amount of FXa at complete activation, k=the kinetic rate constant for activation in the form of k_{cat}/K_{M} with the units of M⁻¹s⁻¹ and E=the enzyme concentration in M units.

### Example 6

### Prediction of Binding to Major Histocompatibility Complex Class II (MHCII) Molecules

[0376] In silico prediction of binding of the sequences listed in Table 3 to MHCII molecules was performed using the NetMHCIIpan-2.0 software described in (Nielsen et al. (2010) Immunome research, 6(1), 9). A set of 376 amino acid sequences were constructed from a framework of DFNQTQPERGDNN(X₆)(X₅)AT(X₄)(X₃)(X₂)Rivgggeckdgecpwq (SEQ ID NO: 242) in which X₂ was proline, X₆ was alanine, X₅ was threonine and X₄ and X₃ were selected from A, D, E, F, G, H, I, K, L, M, N, P, Q, R, S, T, V, W and Y. All sequences were analysed using NetMHCIIPan-2.0 software using a Western European population for MHCII frequencies and a cut-off of 50. Only the results of the best predicted bindings (lowest ranking) are shown in in Table 6. The rank represents the top percentile of the query core peptide compared to 200,000 random natural peptides. For example, a rank of 3 indicates the query peptide as being among the top 3% of random peptides with respect to binding to the specific MHCII molecule. A cut-off below 3 was considered of a significant binding. For comparison, Factor X harbouring the FpA insert (SEQ ID NO: 3) had a predicted rank (2) below cut-off against MHC II molecule HLA-DQA10501-DQB10301.

[0377] None of the sequences listed in Table 3 had a rank below 3 indicating that the strategy of introducing optimising thrombin cleavage rate by an X₂ proline, X₆ alanine, X₅ being a threonine and X₄ and X₃ being selected from A, D, E, F, G, H, I, K, L, M, N, P, Q, R, S, T, V, W and Y was not predicted to produce novel MHCII binding peptides. Thus, by using this in silico approach, introducing a thrombin sensitive cleavage sequence into Factor X would not be expected to create an immunogenic molecule when using one of the best ranked sequences listed in Table 6.

TABLE 6
X₄/X₃ Positional Scanning Library for Predicted MHC II Binding
X₄/X₃ Positional Scanning Library for predicted MHC II binding: form
DFNQTQPERGDNN(X₆)(X₅)AT(X₄)(X₃)(X₂)Rivggqeckdgecpwq (SEQ
ID NO: 242) in which X₂ was proline, X₆ was Alanine, X₅ was threonine
and X₄ and X₃ were selected from A, D, E, F, G, H, I, K, L, M, N, P, Q,
R, S, T, V, W and Y. All amino acid variants herein can form part of
Factor X molecules according to the invention. For comparison, Factor
X harbouring the FpA insert (SEQ ID NO 3) had a predicted rank (2)
below cut-off against MHC II molecule HLA-DQA10501-DQB10301.

| X₄ | X₃ | MHC II molecule | Rank |
|---|---|---|---|
| L | Q | HLA-DQA10301-DQB10302 | 32 |
| L | M | HLA-DQA10102-DQB10602 | 8 |
| L | R | DRB1_1305 | 32 |
| I | Q | HLA-DQA10102-DQB10602 | 8 |
| L | T | DRB1_0901 | 32 |
| F | R | DRB1_0801 | 32 |
| I | M | HLA-DQA10102-DQB10602 | 8 |
| G | G | HLA-DQA10501-DQB10301 | 16 |
| I | R | DRB1_0804 | 32 |
| L | W | HLA-DQA10301-DQB10302 | 32 |
| M | R | DRB1_0806 | 32 |
| L | I | HLA-DQA10102-DQB10602 | 16 |
| I | W | HLA-DQA10301-DQB10302 | 32 |
| M | Q | HLA-DQA10102-DQB10602 | 32 |
| M | T | DRB1_1302 | 32 |
| I | T | DRB1_0804 | 32 |
| L | K | DRB1_0806 | 32 |
| L | S | HLA-DQA10301-DQB10302 | 32 |
| F | Q | HLA-DQA10301-DQB10302 | 32 |
| M | T | DRB1_1302 | 32 |
| L | V | HLA-DQA10102-DQB10602 | 16 |
| M | M | HLA-DQA10102-DQB10602 | 8 |
| F | T | HLA-DQA10401-DQB10402 | 32 |
| P | W | HLA-DQA10301-DQB10302 | 32 |
| P | Q | DRB1_0407 | 50 |
| I | I | DRB1_0407 | 50 |
| I | H | DRB1_0407 | 50 |
| L | H | DRB1_0701 | 50 |
| F | K | DRB1_0402 | 50 |
| F | M | HLA-DQA10102-DQB10602 | 16 |
| I | V | DRB1_0804 | 32 |
| I | K | DRB1_0407 | 50 |
| V | W | HLA-DQA10301-DQB10302 | 32 |
| W | R | HLA-DQA10301-DQB10302 | 32 |
| M | K | DRB1_0407 | 50 |
| P | T | DRB1_1603 | 50 |
| L | S | HLA-DQA10301-DQB10302 | 32 |
| V | Q | DRB1_1603 | 50 |
| L | Y | HLA-DQA10401-DQB10402 | 32 |
| I | K | DRB1_0407 | 50 |
| F | N | HLA-DQA10401-DQB104023 | 2 |
| F | W | HLA-DQA10401-DQB10402 | 32 |
| W | Q | HLA-DQA10301-DQB10302 | 32 |
| M | S | DRB1_1302 | 32 |
| I | Y | HLA-DQA10401-DQB10402 | 32 |
| P | I | DRB1_1603 | 50 |
| M | W | HLA-DQA10301-DQB10302 | 32 |
| M | H | DRB1_0407 | 50 |
| M | I | HLA-DQA10102-DQB10602 | 16 |
| F | H | DRB1_0802 | 50 |
| P | R | DRB1_0701 | 50 |
| M | V | HLA-DQA10102-DQB10602 | 16 |
| W | S | HLA-DQA10301-DQB10302 | 32 |
| W | T | HLA-DQA10401-DQB10402 | 32 |
| V | R | DRB1_0801 | 32 |
| V | T | DRB1_0801 | 32 |
| L | L | HLA-DQA10102-DQB10602 | 16 |
| L | F | HLA-DQA10401-DQB10402 | 32 |
| V | M | HLA-DQA10102-DQB10602 | 8 |
| I | L | DRB1_0407 | 50 |
| P | H | DRB1_1501 | 50 |
| L | E | HLA-DQA10401-DQB10402 | 32 |
| P | Y | DRB1_1603 | 50 |
| F | G | HLA-DQA10301-DQB10302 | 32 |
| I | S | DRB1_0804 | 32 |
| P | M | HLA-DQA10102-DQB10602 | 32 |
| L | N | DRB1_0402 | 32 |
| W | A | HLA-DQA10401-DQB10402 | 32 |
| I | F | HLA-DQA10501-DQB10301 | 32 |
| I | E | HLA-DQA10501-DQB10301 | 32 |
| P | V | DRB1_1501 | 50 |
| W | K | DRB1_0402 | 50 |
| V | I | HLA-DQA10102-DQB10602 | 16 |
| L | A | HLA-DQA10401-DQB10402 | 32 |
| V | H | DRB1_0406 | 50 |
| M | Y | HLA-DQA10301-DQB10302 | 32 |
| P | S | DRB1_1501 | 50 |
| V | V | DRB1_0801 | 32 |
| F | Y | HLA-DQA10401-DQB10402 | 32 |
| M | A | HLA-DQA10301-DQB10302 | 32 |
| I | E | HLA-DQA10501-DQB10301 | 32 |
| W | G | HLA-DQA10301-DQB10302 | 32 |
| V | Y | HLA-DQA10301-DQB10302 | 32 |
| V | V | DRB1_0801 | 32 |
| M | F | HLA-DQA10401-DQB10402 | 32 |
| M | L | HLA-DQA10102-DQB10602 | 16 |
| I | N | HLA-DQA10102-DQB10602 | 8 |
| Q | Q | DRB1_1201 | 50 |
| F | S | HLA-DQA10401-DQB10402 | 32 |
| V | K | HLA-DQA10102-DQB10602 | 16 |
| W | P | HLA-DQA10301-DQB10302 | 32 |
| Q | R | DRB1_1201 | 50 |
| F | F | HLA-DQA10101-DQB10501 | 32 |
| Y | R | DRB1_0402 | 50 |
| F | L | HLA-DQA10101-DQB10501 | 32 |
| P | A | HLA-DQA10301-DQB10302 | 32 |
| P | K | DRB1_1502 | 50 |
| P | F | HLA-DQA10401-DQB10402 | 32 |
| F | A | HLA-DQA10102-DQB10602 | 16 |
| I | A | HLA-DQA10501-DQB10301 | 32 |
| Y | Q | HLA-DQA10301-DQB10302 | 32 |
| I | G | HLA-DQA10501-DQB10301 | 32 |
| V | F | HLA-DQA10401-DQB10402 | 32 |
| M | N | DRB1_1302 | 32 |
| Q | M | HLA-DQA10401-DQB10402 | 32 |
| L | G | HLA-DQA10301-DQB10302 | 32 |
| Q | I | HLA-DQA10401-DQB10402 | 32 |
| Q | W | HLA-DQA10301-DQB10302 | 32 |
| P | L | DRB1_1603 | 50 |
| V | S | DRB1_0801 | 32 |
| P | E | HLA-DQA10301-DQB10302 | 32 |
| Y | T | HLA-DQA10301-DQB10302 | 32 |
| Q | T | HLA-DQA10301-DQB10302 | 32 |
| Q | H | DRB1_0402 | 50 |
| P | G | HLA-DQA10501-DQB10301 | 32 |
| W | M | HLA-DQA10401-DQB10402 | 32 |
| F | V | HLA-DQA10101-DQB10501 | 32 |
| P | A | HLA-DQA10301-DQB10302 | 32 |
| F | I | DRB1_0802 | 32 |
| M | E | HLA-DQA10401-DQB10402 | 32 |
| P | N | DRB1_1501 | 50 |
| Y | S | HLA-DQA10301-DQB10302 | 32 |
| Y | W | HLA-DQA10301-DQB10302 | 32 |
| F | N | HLA-DQA10401-DQB10402 | 32 |
| M | G | DRB1_0103 | 32 |
| F | E | HLA-DQA10401-DQB10402 | 32 |
| Q | V | HLA-DQA10401-DQB10402 | 32 |
| V | E | HLA-DQA10301-DQB10302 | 16 |
| W | H | HLA-DQA10301-DQB10302 | 32 |
| V | S | DRB1_0801 | 32 |
| Q | K | DRB1_1305 | 50 |
| V | N | HLA-DQA10102-DQB10602 | 8 |
| V | G | HLA-DQA10401-DQB10402 | 32 |
| V | L | HLA-DQA10102-DQB10602 | 16 |
| Y | K | DRB1_0101 | 50 |
| Y | H | DRB1_1501 | 50 |
| Y | A | HLA-DQA10401-DQB10402 | 32 |
| Q | Y | HLA-DQA10301-DQB10302 | 32 |
| W | Y | HLA-DQA10101-DQB10501 | 32 |
| Y | M | HLA-DQA10401-DQB10402 | 32 |
| V | A | DRB1_1302 | 32 |
| W | V | HLA-DQA10101-DQB10501 | 32 |
| L | D | DRB1_0301 | 8 |
| Y | Y | HLA-DQA10401-DQB10402 | 32 |
| W | W | HLA-DQA10101-DQB10501 | 32 |
| Y | G | HLA-DQA10301-DQB10302 | 32 |
| L | D | DRB1_0301 | 8 |
| Q | F | HLA-DQA10401-DQB10402 | 32 |
| R | D | HLA-DQA10401-DQB10402 | 32 |
| Q | L | HLA-DQA10401-DQB10402 | 32 |
| L | D | DRB1_0301 | 8 |
| W | N | HLA-DQA10301-DQB10302 | 32 |
| L | D | DRB1_0301 | 8 |
| Q | S | HLA-DQA10301-DQB10302 | 32 |
| L | D | DRB1_0301 | 8 |
| L | D | DRB1_0301 | 8 |
| L | D | DRB1_0301 | 8 |
| L | D | DRB1_0301 | 8 |
| L | D | DRB1_0301 | 8 |
| G | W | HLA-DQA10301-DQB10302 | 32 |
| L | D | DRB1_0301 | 8 |
| H | W | HLA-DQA10501-DQB10301 | 32 |
| R | P | DRB1_0407 | 50 |
| G | T | HLA-DQA10501-DQB10301 | 32 |
| L | D | DRB1_0301 | 8 |
| T | W | HLA-DQA10301-DQB10302 | 32 |
| L | D | DRB1_0301 | 8 |
| L | D | DRB1_0301 | 8 |
| G | R | HLA-DQA10501-DQB10301 | 32 |
| L | D | DRB1_0301 | 8 |
| Y | F | HLA-DQA10101-DQB10501 | 32 |
| L | D | DRB1_0301 | 8 |
| L | D | DRB1_0301 | 8 |
| W | F | HLA-DQA10101-DQB10501 | 32 |
| T | R | HLA-DQA10301-DQB10302 | 32 |
| S | R | HLA-DQA10501-DQB10301 | 32 |
| Y | N | DRB1_1302 | 32 |
| H | R | HLA-DQA10501-DQB10301 | 32 |
| W | E | HLA-DQA10301-DQB10302 | 16 |
| Y | L | DRB1_0802 | 32 |
| Y | I | DRB1_0802 | 32 |
| I | D | HLA-DQA10501-DQB10301 | 32 |
| H | H | HLA-DQA10501-DQB10301 | 32 |
| P | D | HLA-DQA10401-DQB10402 | 32 |
| Q | N | DRB1_1302 | 32 |
| W | I | HLA-DQA10401-DQB10402 | 32 |
| Q | A | HLA-DQA10301-DQB10302 | 32 |
| Q | E | HLA-DQA10401-DQB10402 | 32 |
| W | L | HLA-DQA10101-DQB10501 | 32 |
| V | D | DRB1_0301 | 16 |
| H | Q | HLA-DQA10501-DQB10301 | 32 |
| Y | V | DRB1_0802 | 32 |
| Y | E | HLA-DQA10401-DQB10402 | 32 |
| K | D | HLA-DQA10401-DQB10402 | 32 |
| M | D | DRB1_0301 | 10 |
| S | W | HLA-DQA10301-DQB10302 | 32 |
| H | T | HLA-DQA10501-DQB10301 | 32 |
| G | Y | HLA-DQA10501-DQB10301 | 32 |
| R | W | HLA-DQA10301-DQB10302 | 32 |
| N | R | HLA-DQA10301-DQB10302 | 32 |
| S | T | DRB1_1302 | 32 |
| T | Q | HLA-DQA10301-DQB10302 | 32 |
| T | Y | HLA-DQA10301-DQB10302 | 32 |
| G | Q | HLA-DQA10501-DQB10301 | 32 |
| I | P | HLA-DQA10102-DQB10602 | 8 |
| T | H | HLA-DQA10301-DQB10302 | 32 |
| G | S | HLA-DQA10501-DQB10301 | 16 |
| F | D | HLA-DQA10101-DQB10501 | 32 |
| G | I | HLA-DQA10501-DQB10301 | 32 |
| H | M | HLA-DQA10501-DQB10301 | 32 |
| T | T | HLA-DQA10301-DQB10302 | 32 |
| H | Y | HLA-DQA10501-DQB10301 | 32 |
| H | S | HLA-DQA10501-DQB10301 | 32 |
| T | M | HLA-DQA10301-DQB10302 | 32 |
| G | K | HLA-DQA10501-DQB10301 | 32 |
| G | H | HLA-DQA10501-DQB10301 | 32 |
| G | M | HLA-DQA10102-DQB10602 | 32 |
| S | Q | DRB1_0701 | 50 |
| H | K | HLA-DQA10501-DQB10301 | 32 |
| E | D | HLA-DQA10301-DQB10302 | 16 |
| T | I | HLA-DQA10301-DQB10302 | 32 |
| G | F | HLA-DQA10301-DQB10302 | 32 |
| W | D | HLA-DQA10301-DQB10302 | 16 |
| N | W | HLA-DQA10301-DQB10302 | 32 |
| G | V | HLA-DQA10501-DQB10301 | 32 |
| T | K | HLA-DQA10301-DQB10302 | 32 |
| K | W | DRB1_0302 | 50 |
| E | R | HLA-DQA10301-DQB10302 | 32 |
| V | D | DRB1_0301 | 16 |
| S | K | HLA-DQA10501-DQB10301 | 32 |
| S | Y | HLA-DQA10301-DQB10302 | 32 |
| S | I | DRB1_1302 | 32 |
| Q | G | HLA-DQA10301-DQB10302 | 32 |
| G | L | HLA-DQA10501-DQB10301 | 32 |
| S | H | DRB1_0701 | 50 |
| S | S | DRB1_1302 | 32 |
| H | F | HLA-DQA10501-DQB10301 | 32 |
| T | D | HLA-DQA10301-DQB10302 | 32 |
| H | G | HLA-DQA10501-DQB10301 | 32 |
| D | H | DRB1_1603 | 50 |
| R | I | DRB1_0804 | 32 |
| M | P | DRB1_0407 | 50 |
| K | I | DRB1_0806 | 32 |
| T | V | HLA-DQA10301-DQB10302 | 32 |
| R | R | DRB1_0806 | 32 |
| H | A | HLA-DQA10501-DQB10301 | 32 |
| S | M | HLA-DQA10401-DQB10402 | 32 |
| R | H | DRB1_0406 | 50 |
| G | A | HLA-DQA10501-DQB10301 | 16 |
| S | F | HLA-DQA10401-DQB10402 | 32 |
| Q | S | HLA-DQA10301-DQB10302 | 32 |
| R | L | HLA-DQA10102-DQB10602 | 32 |
| K | H | DRB1_0407 | 50 |
| T | S | HLA-DQA10301-DQB10302 | 32 |
| S | V | DRB1_1302 | 32 |
| Y | D | HLA-DQA10101-DQB10501 | 32 |
| R | G | HLA-DQA10102-DQB10602 | 32 |
| K | L | DRB1_0801 | 32 |
| N | T | HLA-DQA10301-DQB10302 | 32 |
| R | E | HLA-DQA10301-DQB10302 | 32 |
| E | F | HLA-DQA10301-DQB10302 | 32 |
| P | P | DRB1_1603 | 50 |
| G | G | HLA-DQA10501-DQB10301 | 16 |
| T | P | HLA-DQA10301-DQB10302 | 32 |
| H | I | HLA-DQA10501-DQB10301 | 32 |
| H | N | HLA-DQA10501-DQB10301 | 32 |
| K | M | HLA-DQA10102-DQB10602 | 32 |
| S | L | HLA-DQA10102-DQB10602 | 32 |
| R | M | HLA-DQA10102-DQB10602 | 32 |
| S | A | HLA-DQA10102-DQB10602 | 16 |
| N | Y | HLA-DQA10301-DQB10302 | 32 |
| N | F | HLA-DQA10301-DQB10302 | 32 |
| K | R | DRB1_0407 | 50 |
| S | G | HLA-DQA10301-DQB10302 | 32 |
| T | G | HLA-DQA10301-DQB10302 | 32 |
| R | F | HLA-DQA10301-DQB10302 | 32 |
| K | F | HLA-DQA10101-DQB10501 | 50 |
| N | K | HLA-DQA10301-DQB10302 | 32 |
| T | L | HLA-DQA10301-DQB10302 | 32 |
| N | Q | HLA-DQA10301-DQB10302 | 32 |
| H | P | HLA-DQA10501-DQB10301 | 32 |
| S | D | DRB1_0301 | 32 |
| F | P | DRB1_0407 | 50 |
| N | M | HLA-DQA10301-DQB10302 | 32 |
| L | G | HLA-DQA10301-DQB10302 | 32 |
| K | Y | HLA-DQA10101-DQB10501 | 50 |
| G | N | HLA-DQA10501-DQB10301 | 32 |
| T | E | HLA-DQA10301-DQB10302 | 32 |
| R | Y | DRB1_0302 | 50 |
| E | H | HLA-DQA10401-DQB10402 | 32 |
| R | A | HLA-DQA10102-DQB10602 | 16 |
| R | N | DRB1_1302 | 32 |
| R | S | HLA-DQA10301-DQB10302 | 32 |
| N | H | HLA-DQA10301-DQB10302 | 32 |
| E | K | DRB1_1401 | 50 |
| N | L | HLA-DQA10301-DQB10302 | 32 |
| N | I | HLA-DQA10301-DQB10302 | 32 |
| R | Q | DRB1_0407 | 50 |
| T | F | HLA-DQA10301-DQB10302 | 32 |
| R | T | HLA-DQA10101-DQB10501 | 50 |
| N | S | HLA-DQA10301-DQB10302 | 32 |
| K | Q | DRB1_0406 | 50 |
| T | A | HLA-DQA10301-DQB10302 | 32 |
| K | T | DRB1_0406 | 50 |
| D | F | HLA-DQA10401-DQB10402 | 32 |
| T | N | HLA-DQA10301-DQB10302 | 32 |
| R | K | HLA-DQA10101-DQB10501 | 50 |
| K | V | HLA-DQA10101-DQB10501 | 50 |
| R | V | DRB1_1302 | 32 |
| N | V | HLA-DQA10301-DQB10302 | 32 |
| S | N | DRB1_0402 | 32 |
| G | D | HLA-DQA10401-DQB10402 | 32 |
| H | V | HLA-DQA10501-DQB10301 | 32 |
| K | K | HLA-DQA10501-DQB10201 | 50 |
| G | E | HLA-DQA10301-DQB10302 | 32 |
| N | G | HLA-DQA10301-DQB10302 | 32 |
| Q | D | HLA-DQA10401-DQB10402 | 32 |
| H | D | HLA-DQA10501-DQB10301 | 32 |
| H | L | HLA-DQA10501-DQB10301 | 32 |
| K | S | DRB1_0701 | 32 |
| E | I | HLA-DQA10401-DQB10402 | 32 |
| D | V | HLA-DQA10401-DQB10402 | 32 |
| K | G | HLA-DQA10102-DQB10602 | 32 |
| S | P | HLA-DQA10501-DQB10301 | 32 |
| N | A | HLA-DQA10301-DQB10302 | 32 |
| G | P | HLA-DQA10501-DQB10301 | 32 |
| E | Y | HLA-DQA10401-DQB10402 | 32 |
| D | Y | HLA-DQA10401-DQB10402 | 32 |
| Y | G | HLA-DQA10301-DQB10302 | 32 |
| G | G | HLA-DQA10501-DQB10301 | 16 |
| E | A | HLA-DQA10401-DQB10402 | 32 |
| S | E | HLA-DQA10401-DQB10402 | 32 |
| E | W | HLA-DQA10401-DQB10402 | 32 |
| E | T | HLA-DQA10401-DQB10402 | 32 |
| Y | P | DRB1_0406 | 50 |
| K | N | DRB1_1302 | 32 |
| K | A | HLA-DQA10301-DQB10302 | 32 |
| D | G | HLA-DQA10301-DQB10302 | 32 |
| D | R | DRB1_1502 | 50 |
| F | S | HLA-DQA10401-DQB10402 | 32 |
| N | N | HLA-DQA10301-DQB10302 | 32 |
| K | E | HLA-DQA10301-DQB10302 | 32 |
| D | T | HLA-DQA10401-DQB10402 | 32 |
| H | E | HLA-DQA10501-DQB10301 | 32 |
| D | L | HLA-DQA10301-DQB10302 | 32 |
| E | L | HLA-DQA10301-DQB10302 | 32 |
| E | V | HLA-DQA10401-DQB10402 | 32 |
| D | Q | HLA-DQA10301-DQB10302 | 32 |
| E | S | HLA-DQA10401-DQB10402 | 32 |
| E | M | HLA-DQA10301-DQB10302 | 32 |
| N | E | HLA-DQA10301-DQB10302 | 32 |
| D | M | HLA-DQA10401-DQB10402 | 32 |
| D | N | HLA-DQA10301-DQB10302 | 32 |
| E | Q | HLA-DQA10301-DQB10302 | 32 |
| W | Y | HLA-DQA10101-DQB10501 | 32 |
| E | G | HLA-DQA10301-DQB10302 | 32 |
| V | P | DRB1_1603 | 50 |
| D | I | HLA-DQA10301-DQB10302 | 32 |
| E | N | HLA-DQA10401-DQB10402 | 32 |
| L | P | DRB1_0407 | 50 |
| D | S | HLA-DQA10301-DQB10302 | 32 |
| E | E | HLA-DQA10301-DQB10302 | 16 |
| D | W | HLA-DQA10401-DQB10402 | 32 |
| L | P | DRB1_0407 | 50 |
| D | K | DRB1_1501 | 50 |
| N | P | HLA-DQA10301-DQB10302 | 32 |
| D | A | HLA-DQA10401-DQB10402 | 32 |
| N | D | HLA-DQA10301-DQB10302 | 32 |
| E | P | DRB1_1501 | 50 |
| I | A | HLA-DQA10501-DQB10301 | 32 |
| D | D | HLA-DQA10401-DQB10402 | 32 |
| D | P | DRB1_0406 | 50 |
| K | P | DRB1_0407 | 50 |
| D | E | HLA-DQA10401-DQB10402 | 32 |
| Q | P | DRB1_0407 | 50 |
| I | E | HLA-DQA10501-DQB10301 | 32 |

### Example 7

### Prediction of Factor X Peptide Binding to Major Histocompatibility Complex Class II (MHCII) Molecules

### A. Materials and Methods

[0378] In silico prediction of binding of thrombin sensitive Factor X molecules listed in table 8 to MHCII molecules (expressed from HLA-II alleles) was performed using the algorithm NetMHCIIpan 2.1 for HLA-DR predictions (Nielsen et al., (2010) Immunome Research, 6:9) and NetMHCII 2.2 for HLA-DP/DQ predictions (Nielsen et al., (2009) BMC Bioinformatics 10:296). The Immunogenicity Risk Score (IRS) was calculated as the sum of weighted peptide ranks multiplied by population frequency of MHCII/HLA-II alleles (listed in Table 7).

[0379] Ranks were assigned as follows: peptide/MHCII combinations with a rank equal to or below 1 was assigned a weight of 2, combinations with a rank above 1 but equal to or below 3 were assigned a weight of 0.5, and combinations with a rank above 3 but equal to or below 10 were assigned a weight of 0.2. Only novel peptides (not present in wild-type Factor X) with predicted ranks equal to or below 10 were included. Sums are reported separately for HLA-DR, HLA-DP and HLA-DQ loci.

TABLE 7
List of HLA-II Alleles and their Population
Frequency (in Westen European populations)
Used in the Prediction of Factor X Peptide
Binding to MHC-II Molecules

| HLA-II Allele | Population Frequency |
|---|---|
| DRB1_0101 | 0.0830 |
| DRB1_0102 | 0.0064 |
| DRB1_0103 | 0.0269 |
| DRB1_0301 | 0.1484 |
| DRB1_0302 | 0.0004 |
| DRB1_0401 | 0.1035 |
| DRB1_0402 | 0.0044 |
| DRB1_0403 | 0.0032 |
| DRB1_0404 | 0.0441 |
| DRB1_0405 | 0.0032 |
| DRB1_0406 | 0.0004 |
| DRB1_0407 | 0.0148 |
| DRB1_0408 | 0.0036 |
| DRB1_0416 | 0.0008 |
| DRB1_0701 | 0.1516 |
| DRB1_0801 | 0.0201 |
| DRB1_0802 | 0.0012 |
| DRB1_0803 | 0.0024 |
| DRB1_0804 | 0.0008 |
| DRB1_0806 | 0.0008 |
| DRB1_0901 | 0.0060 |
| DRB1_1001 | 0.0068 |
| DRB1_1101 | 0.0305 |
| DRB1_1102 | 0.0016 |
| DRB1_1103 | 0.0036 |
| DRB1_1104 | 0.0197 |
| DRB1_1201 | 0.0136 |
| DRB1_1202 | 0.0004 |
| DRB1_1301 | 0.0469 |
| DRB1_1302 | 0.0325 |
| DRB1_1303 | 0.0136 |
| DRB1_1305 | 0.0004 |
| DRB1_1327 | 0.0004 |
| DRB1_1401 | 0.0181 |
| DRB1_1501 | 0.1677 |
| DRB1_1502 | 0.0048 |
| DRB1_1601 | 0.0124 |
| DRB1_1602 | 0.0004 |
| DRB1_1603 | 0.0004 |
| HLA-DPA10103-DPB10201 | 0.2670 |
| HLA-DPA10103-DPB10401 | 0.6700 |
| HLA-DPA10201-DPB10101 | 0.0200 |
| HLA-DPA10201-DPB10501 | 0.0074 |
| HLA-DQA10101-DQB10501 | 0.0878 |
| HLA-DQA10102-DQB10602 | 0.0854 |
| HLA-DQA10301-DQB10302 | 0.0658 |
| HLA-DQA10401-DQB10402 | 0.0244 |
| HLA-DQA10501-DQB10201 | 0.1006 |
| HLA-DQA10501-DQB10301 | 0.1603 |

### B. Results

[0380] Table 8 below sets forth the predicted immunogenicity risk score of thrombin sensitive Factor X molecules. The total IRS score ranged from 0 to 0.98, indicating predicted differences in potential immunogenicity of the thrombin-sensitive Factor X molecules. When viewed in the context of the four protein design strategies outlined in Example 1, thrombin sensitive Factor X molecules designed by strategy 4 and most of the cleavage sequences designed by strategy 3 showed IRS scores of 0, suggesting a very low immunogenicity risk. Other thrombin sensitive Factor X molecules designed by strategy 3 demonstrated some elevated IRS scores in the 0.02-0.05 range, whereas Factor X molecules created by strategies 1 and 2 showed the greatest propensity for elevated IRS scores (up to 0.98). Thus, the Factor X molecules generated by the minimalistic approaches (strategies 3 and 4) are predicted to be less immunogenic when compared to Factor X molecules with larger amino acid insertions (strategies 1 and 2).

TABLE 8
In silico Predicted Immunogenicity Risk Score of Thrombin Sensitive FX Molecules Based on
Binding to MHC-II Molecules from HLA-DR, HLA-DP and HLA-DQ Alleles

| Compound Name | X₄-X₄′ | HLA-DR | HLA-DP | HLA-DQ | Total |
|---|---|---|---|---|---|
| desGla-FX ins[194] > [YDEDENQSPR]-HPC4 | QSPR-IVGG | 0 | 0 | 0 | 0 |
| desGla-FX ins[194] > [HTHHAPLSPR]-HPC4 | LSPR-IVGG | 0 | 0 | 0 | 0 |
| FX [191-194] > [NATLRPR]-HPC4 | LRPR-IVGG | 0 | 0 | 0 | 0 |
| FX [191-194] > [NATMRPR]-HPC4 | MRPR-IVGG | 0 | 0 | 0 | 0 |
| FX [191-194] > [NATMTPR]-HPC4 | MTPR-IVGG | 0 | 0 | 0 | 0 |
| FX [191-194] > [NATIQPR]-HPC4 | IQPR-IVGG | 0 | 0 | 0 | 0 |
| FX [191-194] > [NATIRPR]-HPC4 | IRPR-IVGG | 0 | 0 | 0 | 0 |
| FX [191-194] > [NATITPR]-HPC4 | ITPR-IVGG | 0 | 0 | 0 | 0 |
| FX [191-194] > [NATFRPR]-HPC4 | FRPR-IVGG | 0 | 0 | 0 | 0 |
| FX [191-194] > [NATLSPR]-HPC4 | LSPR-IVGG | 0 | 0 | 0 | 0 |
| FX [191-194] > [NATLQPR]-HPC4 | LQPR-IVGG | 0 | 0 | 0 | 0 |
| FX [191-194] > [NATLTPR]-HPC4 | LTPR-IVGG | 0 | 0 | 0 | 0 |
| FX [191-194] > [NATMQPR]-HPC4 | MQPR-IVGG | 0 | 0 | 0 | 0 |
| FX [191-194] > [NATIKPR]-HPC4 | IKPR-IVGG | 0 | 0 | 0 | 0 |
| FX [191-194] > [NATLEPR]-HPC4 | LEPR-IVGG | 0 | 0 | 0 | 0 |
| FX [191-194] > [NATDTPR]-HPC4 | DTPR-IVGG | 0 | 0 | 0 | 0 |
| FX [191-194] > [LTPR]-HPC4 | LTPR-IVGG | 0 | 0 | 0 | 0 |
| FX [191-194] > [MTPR]-HPC4 | MTPR-IVGG | 0 | 0 | 0 | 0 |
| FX [191-194] > [ITPR]-HPC4 | ITPR-IVGG | 0 | 0 | 0 | 0 |
| desGla-FX ins[194] > [NESTTKIKPR]-HPC4 | IKPR-IVGG | 0 | 0 | 0 | 0 |
| FX [191-194] > [FTPR]-HPC4 | FTPR-IVGG | 0 | 0 | 0 | 0 |
| FX [191-194] > [NATLKPR]-HPC4 | LKPR-IVGG | 0 | 0 | 0 | 0 |
| FX [191-194] > [NATFTPR]-HPC4 | FTPR-IVGG | 0 | 0 | 0 | 0 |
| FX [191-194] > [NATFKPR]-HPC4 | FKPR-IVGG | 0 | 0 | 0 | 0 |
| FX [191-194] > [NATMKPR]-HPC4 | MKPR-IVGG | 0 | 0 | 0 | 0 |
| FX [191-194] > [NATWQPR]-HPC4 | WQPR-IVGG | 0 | 0 | 0 | 0 |
| FX [191-194] > [NATLMPR]-HPC4 | LMPR-IVGG | 0 | 0 | 0.0171 | 0.0171 |
| desGla-FX ins[194] > [ATNATLDPR ]-HPC4 | LDPR-IVGG | 0.0297 | 0 | 0 | 0.0297 |
| FX [191-194] > [NATLDPR]-HPC4 | LDPR-IVGG | 0.0297 | 0 | 0 | 0.0297 |
| FX ins[194] > [PSILFKPR]-HPC4 | FKPR-IVGG | 0.0310 | 0.0015 | 0 | 0.0325 |
| FX [191-194] > [NATMMPR]-HPC4 | MMPR-IVGG | 0 | 0 | 0.0341 | 0.0341 |
| FX [191-194] > [NATIMPR]-HPC4 | IMPR-IVGG | 0 | 0 | 0.0341 | 0.0341 |
| FX ins[194] > [PSILMKPR]-HPC4 | MKPR-IVGG | 0.0544 | 0 | 0 | 0.0544 |
| FX ins[194] > [PSILWQPR]-HPC4 | WQPR-IVGG | 0.0377 | 0 | 0.0171 | 0.0548 |
| desGla-FX ins[194] > [DNSPSFIQIR]-HPC4 | IQIR-IVGG | 0.0631 | 0 | 0 | 0.0631 |
| FX ins[194] > [PSILLKPR]-HPC4 | LKPR-IVGG | 0.0676 | 0 | 0 | 0.0676 |
| desGla-FX ins[194] > [DFLAEGGGPR ]-HPC4 | GGPR-IVGG | 0 | 0 | 0.0802 | 0.0802 |
| FX ins[194] > [DFLAEGGGPR]-HPC4 | GGPR-IVGG | 0 | 0 | 0.0802 | 0.0802 |
| desGla-FX ins[194] > [DNEEGFFSAR]-HPC4 | FSAR-IVGG | 0 | 0 | 0.0891 | 0.0891 |
| desGla-FX ins[194] > [PDNI AWYLR]-HPC4 | WYLR-IVGG | 0.0426 | 0 | 0.0571 | 0.0997 |
| desGla-FX ins[194] > [LSKNNAIEPR]-HPC4 | IEPR-IVGG | 0.1150 | 0 | 0 | 0.1150 |
| FX ins[194] > [PSILFTPR]-HPC4 | FTPR-IVGG | 0.1159 | 0 | 0 | 0.1159 |
| FX ins[194] > [PSILLRPR]-HPC4 | LRPR-IVGG | 0.1166 | 0 | 0 | 0.1166 |
| FX ins[194] > [DFLAEGGGVR]-HPC4 | GGVR-IVGG | 0.0054 | 0 | 0.1122 | 0.1176 |
| desGla-FX ins[194] > [DFLAEGGGVR ]-HPC4 | GGVR-IVGG | 0.0054 | 0 | 0.1122 | 0.1176 |
| desGla-FX ins[194] > [TVELQGVVPR]-HPC4 | VVPR-IVGG | 0.0357 | 0 | 0.0854 | 0.1211 |
| desGla-FX ins[194] > [STPSILPAPR]-HPC4 | PAPR-IVGG | 0.2230 | 0 | 0 | 0.2230 |
| FX ins[194] > [PSILMTPR]-HPC4 | MTPR-IVGG | 0.2594 | 0 | 0.0171 | 0.2765 |
| FX ins[194] > [STPSILWQPR]-HPC4 | WQPR-IVGG | 0.5058 | 0 | 0.0171 | 0.5229 |
| FX ins[194] > [STPSILFKPR]-HPC4 | FKPR-IVGG | 0.5955 | 0 | 0 | 0.5955 |
| FX ins[194] > [STPSILFTPR]-HPC4 | FTPR-IVGG | 0.6102 | 0 | 0 | 0.6102 |
| FX ins[194] > [STPSILMKPR]-HPC4 | MKPR-IVGG | 0.6297 | 0 | 0 | 0.6297 |
| FX ins[194] > [STPSILLKPR]-HPC4 | LKPR-IVGG | 0.6623 | 0 | 0 | 0.6623 |
| FX ins[194] > [STPSILLRPR]-HPC4 | LRPR-IVGG | 0.6736 | 0 | 0 | 0.6736 |
| FX [191- | LDPR-IVGG | 0.0297 | 0 | 0.6657 | 0.6954 |
| 194] > [GGGSGGGSGDPKPSSEFEEFEIDEE | | | | | |
| EKGGGSGGGNATLDPR]-HPC4 | | | | | |
| desGla-FX ins[194] > [NRLAAALGIR]-HPC4 | LGIR-IVGG | 0.6979 | 0 | 0.0341 | 0.7320 |
| desGla-FX ins[194] > [SEYQTFFNPR]-HPC4 | FNPR-IVGG | 0.2268 | 0.4853 | 0.0439 | 0.7559 |
| FX ins[194] > [STPSI LMTPR]-HPC4 | MTPR-IVGG | 0.7526 | 0 | 0.0341 | 0.7868 |
| FX [191- | LDPR-IVGG | 0.0297 | 0.7269 | 0.2205 | 0.9770 |
| 194] > [GGGSGGGKEEEDIEFEEFESSPKPD | | | | | |
| GSGGGSGGGNATLDPR]-HPC4 | | | | | |

### Example 8

### Heparosan Conjugates—Quantification Method

[0381] The heparosan conjugates of the invention were analysed for purity by HPLC. HPLC was also used for conjugate quantifications. Quantifications were based on area under curve integration using the 280 nm wavelength absorption profile. Plasma derived human Factor X (Lot: HFX 1212, Molecular Innovations, Inc, Novi Mich., USA), was used as reference. A Zorbax 300SB-C3 column (4.6×50 mm; 3.5 μm Agilent, Cat. No.: 865973-909) was used. The column was operated on an Agilent 1100 Series HPLC furnished with fluorescence detector (Ex 280 nm, Em 348 nm). Column temperature was 30° C., with 5 μg sample injection and a flow rate of 1.5 ml/min. Column was eluted with a water (A)—acetonitrile (B) solvent system containing 0.1% trifluoroacetic acid. The gradient program was as follows: 0 min (25% B); 4 min (25% B); 14 min (46% B); 35 min (52% B); 40 min (90% B); 40.1 min (25% B).

### Example 9

### Heparosan Conjugates—SDS-PAGE Analysis

[0382] SDS PAGE analysis was performed using precast NuPage 7% tris-acetate gels, NuPage tris-acetate SDS running buffer and NuPage LDS sample buffer all from Invitrogen. Samples were denaturized (70° C. for 10 min.) before analysis. HiMark HMW (Invitrogen) was used as standard. Electrophoresis was run in an XCell Surelock Complete with power station (Invitrogen) for 80 min at 150 V, 120 mA. Gels were stained using SimplyBlue SafeStain from Invitrogen.

### Example 10

### Synthesis of Heparosan-Benzaldehyde Polymers

[0383] Functionalized HEP polymers of defined size are prepared by an enzymatic (PmHS1) polymerization reaction using the two sugar nucleotides UDP-GlcNAc and UDP-GlcUA. A priming trisaccharide (GlcUA-GlcNAc-GlcUA)N H₂ is used for initiating the reaction, and polymerization is run until depletion of sugar nucleotide building blocks. The terminal amine (originating from the primer) is then functionalized with a benzaldehyde functionality designed for reductive amination chemistry to GSC. Size of HEP polymers can be pre-determined by variation in sugar nucleotide: primer stoichiometry. The technique is described in detail in US 2010/0036001.

[0384] HEP-benzaldehydes can be prepared by reacting amine functionalized HEP polymers with a surplus of N-succinimidyl-4-formylbenzoic acid (Nano Letters (2007) 7(8), pp. 2207-2210) in aqueous neutral solution. The benzaldehyde functionalized polymers may be isolated by ion-exchange chromatography, size exclusion chromatography, or HPLC.

[0385] Terminal HEP amines may alternatively be functionalized into a maleimide reagent to facilitate coupling to cysteine in Factor X cysteine mutants. HEP-maleimides can be prepared by reacting amine functionalized HEP polymers with a surplus of N-maleimidobutyryl-oxysuccinimide ester (GMBS; Fujiwara, K., et al. (1988) J. Immunol. Meth. 112, 77-83).

[0386] The benzaldehyde functionalized polymers may be isolated by ion-exchange chromatography, size exclusion chromatography, or HPLC. Any HEP polymer functionalized with terminal primary amine functionality (HEP-NH₂) may be used in the present examples. Two options are shown below:

[chemical structure]

[0387] Furthermore the terminal sugar residue in the non-reducing end of the polysaccharide can be either N-acetylglucosamine or glucuronic acid (glucuronic acid is drawn above). Typically a mixture of both is to be expected if equimolar amounts of UDP-GlcNAc and UDP-GlcUA have been used in the polymerization reaction.

### Example 11

### Synthesis of 40 kDa Heparosan-GSC Reagent

[chemical structure]

[0389] Glycyl sialic acid cytidine monophosphate (GSC) (20 mg; 32 μmol) in 5.0 ml 50 mM Hepes, 100 mM NaCl, 10 mM CaCl₂ buffer, pH 7.0 was added directly to dry 40 kDa HEP-benzaldehyde (99.7 mg; 2.5 μmol, nitrogen quantification). The mixture was gently rotated until all HEP-benzaldehyde had dissolved. During the following 2 hours, a 1M solution of sodium cyanoborohydride in MilliQ water was added in portions (5×50 μl), to reach a final concentration of 48 mM. Reaction mixture was left at room temperature overnight. Excess of GSC was then removed by dialysis as follows: the total reaction volume (5250 μl) was transferred to a dialysis cassette (Slide-A-Lyzer Dialysis Cassette, Thermo Scientific Prod#66810 with cut-off 10 kDa capacity: 3-12 ml). Solution was dialysed for 2 hours against 2000 ml of 25 mM Hepes buffer (pH 7.2) and once more for 17 h against 2000 ml of 25 mM Hepes buffer (pH 7.2). Complete removal of excess GSC from inner chamber was verified by HPLC on Waters X-Bridge phenyl column (4.6 mm×250 mm, 5 μm) and a water acetonitrile system (linear gradient from 0-85% acetonitrile over 30 min containing 0.1% phosphoric acid) using GSC as reference. Inner chamber material was collected and freeze dried to give 83% (nitrogen quantification) 40 kDa HEP-GSC as white powder. The HEP-GSC reagent made by this procedure contains a HEP polymer attached to sialic acid cytidine monophosphate via a 4-methylbenzoyl linkage.

### Example 12

### Desilylation of pdFX

[0390] To plasma derived Factor X (14.3 mg) was added sialidase (Arthrobacter ureafaciens (AUS), 750 μl, 0.3 mg/ml, 200 U/ml) in 50 mM Hepes, 100 mM NaCl, pH 7.0 (10 ml), and left for 1 hour at room temperature. The reaction mixture was then diluted with 50 mM Hepes, 150 mM NaCl, pH 7.0 (5 ml), and cooled on ice. A solution of 100 mM EDTA (4 ml) was added in small portions. The EDTA treated sample was then applied to a 2×5 ml interconnected HiTrap Q FF ion-exchange columns (Amersham Biosciences, GE Healthcare) with a combined CV=10 ml and equilibrated with 50 mM Hepes, 150 mM NaCl, 0.01% Tween 80, pH 7.0. Sialidase was eluted with 50 mM Hepes, 150 mM NaCl, 0.01% Tween 80, pH 7.0 (4 CV), before eluting asialo-pdFX with 50 mM Hepes, 150 mM NaCl, 10 mM CaCl₂, 0.01% Tween 80, pH 7.0 (10 CV). Asialo-pdFX was in this way isolated in 50 mM Hepes, 150 mM NaCl, 10 mM CaCl₂, 0.01% Tween 80, pH 7.0 (19 ml). Yield (13.1 mg) and concentration (0.69 mg/ml) was determined by HPLC.

### Example 13

### Synthesis of 40 kDa Heparosant-[N]-pdFX

[0391] To asialo-pdFX (13.1 mg) in 50 mM Hepes, 150 mM NaCl, 10 mM CaCl₂, 0.01% Tween 80, pH 7.0 (19 ml) was added 40 kDa HEP-GSC (19.4 mg) and rat ST3GaIIII enzyme (2.44 mg; 1.1 unit/mg) in 20 mM Hepes, 120 mM NaCl, 50% glycerol, pH 7.0 (4.9 ml). The reaction mixture was incubated for 16 hours at 32° C. under slow stirring. A solution of 157 mM CMP-NAN in 50 mM Hepes, 150 mM NaCl, 10 mM CaCl2, pH 7.0 (0.71 ml) was then added, and the reaction was incubated at 32° C. for an additional hour. HPLC analysis showed a product distribution containing un-reacted pdFX (56%), mono HEPylated pdFX (37%) and polyHEPylated product (7%). The reaction mixture was divided into 4 portions, and each portion was applied to a HiLoad 16/60 Superdex200 pregrade column (CV=124 ml), equilibrated with 50 mM Hepes, 150 mM NaCl, 10 mM CaCl₂, 0.01% Tween 80, pH 7.0. The column was eluted with the same buffer and fractions containing un-reacted and HEP modified pdFX from all runs were pooled into a single 48 ml fraction. Fractions were cooled on ice, and 100 mM EDTA solution (7 ml) was added in small portions. The EDTA treated sample was then applied to a 2×5 ml HiTrap Q FF ion-exchange column (Amersham Biosciences, GE Healthcare) with a combined CV=10 ml and equilibrated with 10 mM His, 100 mM NaCl, 0.01% Tween 80, pH 7.5. The column was washed with 4 column volumes of 10 mM His, 100 mM NaCl, pH 7.5 and 10 column volumes of 10 mM His, 100 mM NaCl, 10 mM CaCl₂, 0.01% Tween 80, pH 7.5 to eluted unmodified pdFX. The pH was then lowered to 6.0 with 10 mM His, 100 mM NaCl, 10 mM CaCl₂, 0.01% Tween 80, pH 6.0 (10 column volumes). HEPylated pdFX was then eluted off the column with 10 column volumes of 10 mM His, 100 mM NaCl, 10 mM CaCl₂, 0.01% Tween 80, pH 6.0 (40%) and 10 mM His, 1 M NaCl, 10 mM CaCl₂, 0.01% Tween 80, pH 6.0 (60%) buffer mixture. Combined fractions were then dialyzed against 10 mM His, 150 mM NaCl, 5 mM CaCl₂, 0.005% Tween 80, pH 6.4 using a Slide-A-Lyzer cassette (Thermo Scientific) with a cut-off of 10 kDa. Yield (2 mg) and concentration (0.45 mg/ml) was determined by HPLC.

### Example 14

### Conjugation of Heparosan Polymers to the N-Glycans of Thrombin Sensitive FX Molecules

[0392] Factor X molecules carrying modifications for example in the activation peptide as described herein, may be conjugated to HEParosan in a similar manner as described in Examples 12-13. To facilitate N-glycan conjugation, the FX molecule is initially treated with sialidase as described in example 12. The process removes sialic acids from the N-glycan termini and allows for sialyltransferase mediated transfer of heparosan modified sialic acids from the HEP-GSC reagents to the asialo-FX molecule. After capping of non-reacted N-glycan termini with sialic acid the HEP-FX molecules are isolated by a size exclusion chromatography, anion/cation exchange chromatography, affinity chromatography or a combination of these chromatographic methods.

### Example 15

### Selective Reduction of a Factor X Single Cysteine Mutant

[0393] Factor X single cysteine molecules when produced in mammalian cells are typically isolated with its non-paired cysteine blocked by low molecular thiols as mixed disulfides. To facilitate HEP conjugation, the mixed disulfide initially needs to be unblocked in order to make the thiol group available for coupling. Unblocking can be performed by chemical reduction using phosphine-based reducing reagents. Alternatively, Factor X single cysteine molecules can be reduced using a glutathione based redox buffer system, in similar manner as described for FVIIa407C in US 20090041744. In one method, non-reduced Factor X single cysteine molecules are incubated for 24 hours at room temperature in a mixture of containing GSH, GSSG, and Grx2. The reduced Factor X single cysteine molecule is then isolated by ion-exchange chromatography as described in example 12.

### Example 16

### Synthesis of 40 kDa HEP-[C]-FX Cysteine Molecule

[0394] A solution of single cysteine reduced Factor X molecules as prepared in the above Example 15 is reacted with a 41.5 kDa HEP maleimide reagent in an appropriate buffer such as 50 mM Hepes, 100 mM NaCl, 10 mM CaCl₂, pH 7.0. The conjugation process can be followed by HPLC methods as described in Example 8. When conjugation is complete, the HEP-[C]-FX cysteine molecule can be isolated by a size exclusion chromatography, anion/cation exchange chromatography, affinity chromatography or a combination of these chromatographic methods, as described in Example 13.

### Example 17

### GlycoHEPylation of Human Factor X Increase the Circulatory Half-Life of Factor X in Haemophilia a Mice

[0395] A pharmacokinetic study of human plasma derived Factor X (pdFX) and a human pdFX that was glycoHEPylated on the N-glycans with 40 kDa heparosan (40 kDa HEP), hereafter referred to as 40 kDa HEP-[N]-pdFX, was performed in FVIII knock-out (FVIII-KO) mice. The objective of the study was to evaluate the effect of protraction on the pharmacokinetics of pdFX. The compounds investigated were pdFX purchased from Molecular Innovations, Inc (Novi Mich., USA); catalog no HCX-0050 Lot. HFX-1212. Based on this material, a glycoHEPylation was performed based on the methods outlined in Examples 12-13 to produce a 40 kDa HEP-[N]-pdFX. A total of 30 FVIII-KO mice of mixed gender, bred at Taconic, were included in the study. They were dosed with a single bolus IV injection of 16.7 nmol/kg equal to 1 mg/kg. The dose volume was 5 ml/kg. Blood samples were collected from the orbital sinus for 18 (pdFX) and 96 (40 kDa HEP-[N]-pdFX) hours post dosing in a sparse sampling schedule (3 mice per time point, 3 samples per mice). The plasma levels of Factor X were measured using a modified commercial Factor X enzyme immunoassay (Human FX ELISA kit, cat no. KSP-134, Nordic BioSite, Copenhagen, Denmark) where Factor X is detected in a monoclonal anti-FX coated plate with a polyclonal anti-FX-biotin and a streptavidin-peroxidase conjugate. The calibrator provided by the kit was exchanged with pdFX and 40 kDa HEP-[N]-pdFX spiked into diluted FVIII KO mouse plasma for analysis of plasma levels of pdFX and HEP-pdFX respectively. QC samples were prepared by spiking pdFX or HEP-pdFX into diluted F8-KO mouse plasma.

[0396] The pharmacokinetic parameters were calculated by non-compartmental analysis (NCA). The plasma profile and pharmacokinetic parameters are shown in FIG. 9 and Table 9, respectively.

[0397] The plasma half-life (T½) and mean residence time (MRT) of pdFX in the FVIII-KO mice were 3.8 and 5.2 hours, respectively. By conjugating a 40 kDa heparosan polymer to Factor X the half-life and MRT increased by a factor of 5 to 19.5 and 24.7 hours, respectively. As described below in Example 18, glycoPEGylation of human Factor X showed a 4.4-fold prolonged plasma half-life in C57BL6 mice compared to non-modified human FX. The plasma profiles for Factor X conjugated to HEP and PEG, respectively, were comparable (cf. FIG. 9).

TABLE 9
Mean pharmacokinetic parameters of FX and 40 kDa HEP-[N]-pdFX
after IV administration of 1 mg/kg to FVIII-KO mice

| | Cmax | AUC | Vz | Cl | MRT | T½ |
|---|---|---|---|---|---|---|
| Compound | (nmol/L) | (hr*nmol/L) | (mL/kg) | (mL/hr/kg) | (hr) | (hr) |
| pdFX | 99 | 443* | 205 | 37.7 | 5.2 | 3.8 |
| 40 kDa HEP-[N]- | 148 | 2257 | 209 | 7.4 | 24.7 | 19.5 |
| pdFX | | | | | | |

### Example 18

### Prolonged Circulatory Plasma Half-Life of GlycoPEGylated Human Factor X in Normal Mice

[0398] A pharmacokinetic study of human FX and a PEGylated human FX (FX-GP) was performed, in nave mice. The objective of the study was to investigate the effect of protraction of Factor X (in this case a glycopegylation) on the clearance of the compound. The compounds investigated were Factor X (HCX-0050 Lot. AA1208) and FX-GP.

[0399] Wild type, plasma-derived Factor X was purchased from Haematologic Technologies (HCX-0050). Based on this material, a glycoPEGylation was performed according to standard procedures used previously at Novo Nordisk for FVIIa and FIX (Neose protocol). The PEGylation and subsequent chromatographic separation gave a preparation of mono-PEGylated devoid of non-PEGylated FX but containing approx 5% of di-PEGylated FX. The site(s) of PEGylation was not determined.

[0400] A total of 30 C57BL/6J mice bred at Taconic were dosed with a single bolus IV injection of the compounds. The plasma levels of FX were measured by an enzyme immunoassay (EIA) for 168 hours post dosing by sparse sampling (3 mice per time point, 3 samples per mice, see section 5.1.4.1). The pharmacokinetic parameters were calculated by non-compartmental analysis (NCA). The measured plasma concentrations are presented in Table 10 and obtained PK parameters are shown in Table 11.

TABLE 10
Plasma Concentration at the Time of Observation and Mean Concentrations of FX and
FX-GP in Naïve Mice After Single Dose I.V. Administration of 1 mg/kg

| | | TIME (hr) | | | | | | | |
|---|---|---|---|---|---|---|---|---|---|
| | | 0.080 | 0.25 | 0.50 | 1.0 | 4.0 | 7.0 | 17 | 24 |
| COMPOUND | SUBJECT | Concentration (ug/ml) | | | | | | | |
| FX | 1.0 | 8.6 | | | | | | <LLOQ | |
| | 2.0 | 11 | | | | | | <LLOQ | |
| | 3.0 | 11 | | | | | | <LLOQ | |
| | 4.0 | | 8.4 | | | | 0.89 | | |
| | 5.0 | | 11 | | | | 1.0 | | |
| | 6.0 | | 12 | | | | 1.3 | | |
| | 7.0 | | | 5.8 | | | | | <LLOQ |
| | 8.0 | | | 9.3 | | | | | <LLOQ |
| | 9.0 | | | 12 | | | | | <LLOQ |
| | 10 | | | | 3.8 | | | | |
| | 11 | | | | 6.1 | | | | |
| | 12 | | | | 6.3 | | | | |
| | 13 | | | | | 2.2 | | | |
| | 14 | | | | | 2.3 | | | |
| | 15 | | | | | 3.3 | | | |
| | Mean | 10.123 | 10.273 | 9.083 | 5.387 | 2.597 | 1.070 | NC | NC |
| | SD | 1.423 | 1.716 | 3.233 | 1.394 | 0.637 | 0.203 | NC | NC |
| | CV % | 14.1 | 16.7 | 35.6 | 25.9 | 24.5 | 19.0 | NC | NC |
| FX-GP | 16 | 6.6 | | | | | | 1.7 | |
| | 17 | 8.3 | | | | | | 2.8 | |
| | 18 | 8.3 | | | | | | 1.8 | |
| | 19 | | 7.2 | | | | 4.5 | | |
| | 20 | | 5.8 | | | | 3.1 | | |
| | 21 | | 6.9 | | | | 4.4 | | |
| | 22 | | | 4.4 | | | | | 1.1 |
| | 23 | | | 5.2 | | | | | 0.73 |
| | 24 | | | 6.9 | | | | | 2.1 |
| | 25 | | | | 2.4 | | | | |
| | 26 | | | | 5.0 | | | | |
| | 27 | | | | 2.8 | | | | |
| | 28 | | | | | 5.3 | | | |
| | 29 | | | | | 7.0 | | | |
| | 30 | | | | | 6.8 | | | |
| | Mean | 7.697 | 6.613 | 5.517 | 3.420 | 6.353 | 3.977 | 2.130 | 1.323 |
| | SD | 0.984 | 0.755 | 1.294 | 1.391 | 0.944 | 0.806 | 0.618 | 0.703 |
| | CV % | 12.8 | 11.4 | 23.5 | 40.7 | 14.9 | 20.3 | 29.0 | 53.1 |

| | | TIME (hr) | | | | | | |
|---|---|---|---|---|---|---|---|---|
| | | 30 | 48 | 72 | 96 | 120 | 140 | 170 |
| COMPOUND | SUBJECT | Concentration (ug/ml) | | | | | | |
| FX | 1.0 | | | <LLOQ | | | | |
| | 2.0 | | | <LLOQ | | | | |
| | 3.0 | | | <LLOQ | | | | |
| | 4.0 | | | | <LLOQ | | | |
| | 5.0 | | | | <LLOQ | | | |
| | 6.0 | | | | <LLOQ | | | |
| | 7.0 | | | | | <LLOQ | | |
| | 8.0 | | | | | <LLOQ | | |
| | 9.0 | | | | | <LLOQ | | |
| | 10 | <LLOQ | | | | | <LLOQ | |
| | 11 | <LLOQ | | | | | <LLOQ | |
| | 12 | <LLOQ | | | | | <LLOQ | |
| | 13 | | <LLOQ | | | | | <LLOQ |
| | 14 | | <LLOQ | | | | | <LLOQ |
| | 15 | | <LLOQ | | | | | <LLOQ |
| | Mean | NC | NC | NC | NC | NC | NC | NC |
| | SD | NC | NC | NC | NC | NC | NC | NC |
| | CV % | NC | NC | NC | NC | NC | NC | NC |
| FX-GP | 16 | | | 0.73 | | | | |
| | 17 | | | 0.97 | | | | |
| | 18 | | | <LLOQ | | | | |
| | 19 | | | | <LLOQ | | | |
| | 20 | | | | <LLOQ | | | |
| | 21 | | | | <LLOQ | | | |
| | 22 | | | | | <LLOQ | | |
| | 23 | | | | | <LLOQ | | |
| | 24 | | | | | <LLOQ | | |
| | 25 | 0.66 | | | | | <LLOQ | |
| | 26 | 0.47 | | | | | <LLOQ | |
| | 27 | 0.48 | | | | | <LLOQ | |
| | 28 | | <LLOQ | | | | | |
| | 29 | | <LLOQ | | | | | <LLOQ |
| | 30 | | <LLOQ | | | | | <LLOQ |
| | Mean | 0.537 | NC | 0.850 | NC | NC | NC | NC |
| | SD | 0.107 | NC | 0.170 | NC | NC | NC | NC |
| | CV % | 19.9 | NC | 20.0 | NC | NC | NC | NC |

TABLE 11
Estimated Pharmacokinetic Parameters After I.V.
Administration of FX and FX-GP Based on Sparse
Sampling and Non-Compartmental Analysis

| Com- | Dose | t½ | CL | AUC | AUC % Extrap | MRT |
|---|---|---|---|---|---|---|
| pound | (mg/kg) | (hr) | (ml/hr/kg) | (hr*ug/ml) | (%) | (hr) |
| FX | 1 | 2.3 | 34 | 30 | 12 | 3.0 |
| FX-GP | 1 | 9.9 | 11 | 94 | 11 | 14 |

[0401] GlycoPEGylation of human pdFX through conjugation to the N-linked glycans located in the activation peptide of pdFX showed a 4.4-fold prolonged plasma half-life in mice compared to non-modified human pdFX.

### Example 19

### Screening the Thrombin Sensitive FX Molecules to Evaluate the Kinetic Rate Constants for Activation by α-Thrombin (FIIa)

### A. Assay Protocol

[0402] The reaction kinetics describing the activation of thrombin sensitive FX molecules by human α-thrombin (FIIa) were evaluated using a classical Michaelis Menten approach in which a range of Factor X or thrombin sensitive FX molecules was used to calculate the kinetic rate constants, where the substrate (thrombin sensitive FX molecules) was at least 10 to 20 fold in excess of the activating protease (FIIa). This method was carried out essentially as described by Louvain-Quintard et al. (2005) JBC, 280: 41352-41359 with minor modifications in the protocol to accommodate screening multiple thrombin sensitive FX molecules concurrently. Briefly, thrombin sensitive FX molecules were diluted in assay buffer (50 mM Hepes, 150 mM NaCl, 10 mM CaCl₂, 0.1% PEG8000, 0.1% BSA, pH 7.4) to an initial working concentration of ˜2 to 4 μM, representing the highest concentration of thrombin sensitive FX molecule tested. The thrombin sensitive FX molecules were further serially diluted 2-fold into assay buffer to generate a dose response curve ranging from 0 nM to 4000 nM in a 96-well polypropylene assay plate. In some cases, stock concentrations only permitted dose response curves ranging from 0 to 1000 nM, 0 to 2000 nM or other final concentration interval between 1000 nM and 4000 nM. Thrombin activation reactions were triggered by the addition of 11 μL of 10 nM α-thrombin diluted in assay buffer to 100 μL of the thrombin sensitive FX for a final α-thrombin concentration of 1 nM in a 111 μL reaction volume. Reactions were incubated at 37° C. for a total of 30 min, 60 min or 120 min depending on the expected reaction rate. Reactions were quenched at the end of the incubation period by withdrawing duplicate 40 μL aliquots and adding to each of two wells in a black 96-well polystyrene assay plate containing 10 μL of 500 nM hirudin (recombinant His-tagged) yielding a final concentration of 100 nM hirudin. The quantity of FXa generated during that assay was determined by adding 50 μL of a 1 mM solution of a specific fluorogenic FXa substrate, Pefafluor FXa (CH₃SO₂-D-CHA-Gly-Arg-AMC; Pentapharm, Switzerland), and by comparison to a standard curve of known amounts of FXa (0 nM to 5 nM). The final concentration of Pefafluor FXa in the quantitation reaction was 0.5 mM.

[0403] Reaction progress curves were monitored in a SpectraMax fluorescence plate reader for 10 min at 25° C. and analysed as described below. The catalytically active concentration of the FXa standard was determined by titration with 4-Methylumbelliferyl 4-guanidinobenzoate (MUGB), a fluorogenic ester substrate developed as an active site titrant for serine proteases essentially as described by Payne et al. (1996) Biochemistry, 35(22): 7100-7106. Due to the sensitivity of the assay, in some instances it was necessary to inhibit trace amounts of background FXa activity in the sample by inhibition with 100 μM Glu-Gly-Arg-chloromethylketone (EGR-cmk) for 2 hrs at room temperature followed by extensive dialysis against a storage buffer comprising 10 mM MES, 150 mM NaCl, 10 mM CaCl₂, pH 6.0.

### B. Data Analysis

[0404] The raw reaction progress curves of Pefafluor FXa hydrolysis were analysed to determine the kinetic parameters k_{cat} (s⁻¹), K_{M} (nM or M) and k_{cat}/K_{M} (M⁻¹s⁻¹). Raw reaction velocities were initially analysed as fluorescence units/s (FU/s) within the Softmax Pro software suite associated with the SpectraMax fluorescence plate reader and subsequently converted to nM FXa using a standard curve created from the reaction velocities (FU/s) of know amounts of FXa (see above). The concentration of FXa generated during the course of the assay was then transformed into reaction velocities of the form nM FXa/s using equation (1).

$$\frac{nM FXa}{36 C .} = \frac{nM FXa Generated}{Total Reaction Time ( s )} \qquad Equation ( 1 )$$

[0405] Reaction velocities (nM FXa/s) were plotted against the concentrations of thrombin sensitive FX molecules and fit to the function of a standard rectangular hyperbola (i.e. Michaelis Menten equation) given by equation (2) to yield the fit values of k_{cat} and K_{M}, where E is the concentration of activating protease (FIIa) and Sₒ is the concentration of thrombin sensitive FX molecule in the dose response curve.

$$Reaction Velocity ( nM FXa \text{/} s ) = \frac{{k}_{cat} E [ {S}_{o} ]}{{K}_{M} + [ {S}_{o} ]} \qquad Equation ( 2 )$$

The specificity constant k_{cat}/K_{M} was calculated directly from the fit values of K_{M} and k_{cat} upon evaluation of equation (2).

[0406] For reactions that resulted in an apparent K_{M} that was indeterminate or greater than the highest tested concentration of thrombin sensitive FX molecule in the assay, the data was analysed in the linear dose range of the assay. For data collected using the linear range of the assay, the k_{cat}/K_{M} kinetic constants were directly calculated from the slopes of linear regression analyses of the thrombin sensitive FX concentrations versus the velocity of FXa generation (FXa/s) according to equation (3).

$$\frac{{k}_{cat}}{{K}_{M}} = \frac{slope}{[ FIIa ]} \qquad Equation ( 3 )$$

### C. Results

[0407] Tables 12-13 below set forth the kinetic parameters (k_{cat}, K_{M} and k_{cat}/K_{M}) determined for the activation of HPC4-tagged thrombin sensitive FX molecules by α-thrombin (FIIa), as well as recombinant FX (designated as FX-HPC4) and plasma purified FX (Molecular Innovations, Novi Mich., USA). Tables 12 and 13 also provide the standard deviation (S.D.) and the number of assays performed (n). Data are presented in Tables 12 and 13 as the ranked k_{cat}/K_{M} values.

[0408] The observed specificity constants (k_{cat}/K_{M}) ranged from no detectable activation by thrombin (designated No Activity) to k_{cat}/K_{M} values of 2.8E+04 M⁻¹s⁻¹ for a variant with a modified fibrinopeptide A (FpA) sequence that has a proline at X₂ (FX ins[194]>[DFLAEGGGPR]-HPC4). This activation rate is 10× the observed activation rate for a variant having the unmodified FpA sequence (FX ins[194]>[DFLAEGGGVR]-HPC4). Despite having the same engineered cleavage site, the method of introducing the cleavage site into the FX molecule significantly affected the activation rate. For instance, the two thrombin sensitive FX molecules, FX [191-194]>[MTPR]-HPC4 and FX [191-194]>[NATMTPR]-HPC4 comprise the X₄-X_{4′} cleavage sequence of MTPR-IVGG, wherein the cleavage occurs between X₁ and X_{1′} (i.e. R—I bond). The FX [191-194]>[MTPR]-HPC4 molecule is readily activated at a rate of 1.4E+03 M⁻¹s⁻¹ and the FX [191-194]>[NATMTPR]-HPC4 molecule cannot be activated (see Tables 12 and 13). While many of the preferred thrombin sensitive FX molecules show favourable activation kinetics with similar k_{cat}/K_{M} values in the range of 1.0E+03 to 3.0E+03 M⁻¹s⁻¹, the aforementioned thrombin sensitive FX molecules are differentiated by variances in the individual k_{cat} and K_{M} values (Table 12: For instance compare FX [191-194]>[MTPR]-HPC4 having a lower K_{M} of 1129 nM with FX ins[194]>[DFLAEGGGVR]-HPC4 having a K_{M} of 2239 nM or FX [191-194]>[LTPR]-HPC4 having a K_{M} of 2703 nM, each of which have 5-10 fold higher k_{cat} values than FX [191-194]>[MTPR]-HPC4.

[0409] Table 14 sets forth the kinetic parameters (k_{cat}, K_{M} and k_{cat}/K_{M}) determined for the activation of the thrombin sensitive FX molecule FX ins[194]>[DFLAEGGGVR]-HPC4, which has been conjugated with a 21 kDa, 40 kDa or 73 kDa heparosan polymer for mono-hepylation on a N-glycan in the activation peptide of the molecule. As shown in Table 14, there is no significant effect of hepylation on the observed kinetic parameters for the tested molecule.

TABLE 12
Kinetic Parameters for Activation of Thrombin Sensitive FX Molecules (Hyperbolic)

| | | k_{cat} | ±S.D. | K_{M} | ±S.D. | k_{cat}/K_{M} | ±S.D. | |
|---|---|---|---|---|---|---|---|---|
| Compound Name | X₄-X_{4′} | (s⁻¹) | (s⁻¹) | (nM) | (nM) | (M⁻¹s⁻¹) | (M⁻¹s⁻¹) | n |
| FX ins[194]>[DFLAEGGGPR]-HPC4 | GGPR-IVGG | 1.6E−02 | 1.0E−02 | 592 | 417 | 2.8E+04 | 2.2E+03 | 2 |
| desGla-FX ins[194]>[DFLAEGGGPR]-HPC4 | GGPR-IVGG | 8.8E−03 | 7.8E−03 | 1296 | 964 | 6.4E+03 | 1.3E+03 | 2 |
| FX ins[194]>[STPSILFKPR]-HPC4 | FKPR-IVGG | 7.0E−03 | 1.2E−03 | 1623 | 554 | 4.7E+03 | 2.3E+03 | 2 |
| FX [191-194]>[LTPR]-HPC4 | LTPR-IVGG | 9.0E−03 | 1.1E−03 | 2703 | 317 | 3.4E+03 | 7.9E+02 | 2 |
| FX ins[194]>[PSILFTPR]-HPC4 | FTPR-IVGG | 6.8E−03 | n.d. | 2049 | n.d. | 3.3E+03 | n.d. | 1 |
| FX ins[194]>[DFLAEGGGVR]-HPC4 | GGVR-IVGG | 6.0E−03 | 3.9E−03 | 2239 | 632 | 2.6E+03 | 1.2E+03 | 3 |
| FX ins[194]>[STPSILLKPR]-HPC4 | LKPR-IVGG | 3.0E−03 | 1.9E−03 | 1435 | 800 | 2.0E+03 | 1.9E+02 | 3 |
| FX [191-194]>[MTPR]-HPC4 | MTPR-IVGG | 1.4E−03 | 5.3E−04 | 1129 | 741 | 1.4E+03 | 4.9E+02 | 4 |
| FX [191-194]>[LTPR]-HPC4 | LTPR-IVGG | 1.8E−04 | 1.1E−06 | 141 | 8 | 1.2E+03 | 8.1E+01 | 2 |
| FX [191-194]>[NATLTPR]-HPC4 | LTPR-IVGG | 2.2E−03 | 2.0E−04 | 2328 | 600 | 1.0E+03 | 1.9E+02 | 3 |
| FX [191-194]>[NATLQPR]-HPC4 | LQPR-IVGG | 2.7E−03 | 2.4E−03 | 2669 | 146 | 9.9E+02 | 8.4E+02 | 2 |
| FX ins[194]>[STPSILFTPR]-HPC4 | FTPR-IVGG | 4.8E−03 | n.d. | 6013 | n.d. | 7.9E+02 | n.d. | 1 |
| desGla-FX ins[194]>[STPSILPAPR]-HPC4 | PAPR-IVGG | 1.1E−03 | n.d. | 1517 | n.d. | 7.2E+02 | n.d. | 1 |
| FX [191-194]>[NATLKPR]-HPC4 | LKPR-IVGG | 1.6E−03 | n.d. | 2458 | n.d. | 6.5E+02 | n.d. | 1 |
| FX [191-194]>[NATFKPR]-HPC4 | FKPR-IVGG | 6.3E−04 | n.d. | 1327 | n.d. | 4.8E+02 | n.d. | 1 |
| desGla-FX ins[194]>[NESTTKIKPR]-HPC4 | IKPR-IVGG | 1.0E−03 | 3.5E−05 | 2397 | 91 | 4.4E+02 | 3.1E+01 | 2 |
| desGla-FX ins[194]>[SEYQTFFNPR]-HPC4 | FNPR-IVGG | 1.2E−03 | 4.4E−04 | 2702 | 1086 | 4.3E+02 | 3.2E+01 | 3 |
| FX [191-194]>[NATMQPR]-HPC4 | MQPR-IVGG | 7.0E−04 | 8.1E−04 | 1597 | 1174 | 3.8E+02 | 1.5E+02 | 4 |
| FX [191-194]>[NATMKPR]-HPC4 | MKPR-IVGG | 1.8E−04 | 4.0E−05 | 674 | 103 | 2.8E+02 | 9.9E+01 | 3 |
| FX [191-194]>[NATLSPR]-HPC4 | LSPR-IVGG | 6.5E−05 | 5.4E−06 | 264 | 33 | 2.5E+02 | 1.1E+01 | 2 |
| FX [191-194]>[NATWQPR]-HPC4 | WQPR-IVGG | 6.6E−04 | 6.1E−05 | 4167 | 996 | 1.6E+02 | 4.3E+01 | 3 |
| FX [191-194]>[NATLDPR]-HPC4 | LDPR-IVGG | 1.6E−04 | 2.9E−05 | 1151 | 228 | 1.4E+02 | 2.3E+00 | 2 |

TABLE 13
Kinetic Parameters for Activation of Thrombin Sensitive FX Molecules (Linear)

| | | k_{cat}/K_{M} | ±S.D. | |
|---|---|---|---|---|
| Compound Name | X₄-X_{4′} | (M⁻¹s⁻¹) | (M⁻¹s⁻¹) | n |
| FX ins[194] > [DFLAEGGGPR]-HPC4 | GGPR-IVGG | 1.3E+04 | n.d. | 1 |
| FX ins[194] > [PSILFTPR]-HPC4 | FTPR-IVGG | 8.5E+03 | n.d. | 1 |
| desGla-FX ins[194] > [DFLAEGGGPR ]-HPC4 | GGPR-IVGG | 5.5E+03 | n.d. | 1 |
| FX [191-194] > [LTPR]-HPC4 | LTPR-IVGG | 2.1E+03 | 6.0E+02 | 2 |
| FX ins[194] > [STPSILFKPR]-HPC4 | FKPR-IVGG | 1.9E+03 | 1.0E+02 | 2 |
| FX ins[194] > [DFLAEGGGVR]-HPC4 | GGVR-IVGG | 1.6E+03 | 4.5E+02 | 6 |
| FX ins[194] > [STPSILLKPR]-HPC4 | LKPR-IVGG | 1.2E+03 | 4.3E+02 | 4 |
| FX ins[194] > [PSILMTPR]-HPC4 | MTPR-IVGG | 8.6E+02 | n.d. | 1 |
| FX ins[194] > [STPSILMTPR]-HPC4 | MTPR-IVGG | 7.9E+02 | n.d. | 1 |
| FX ins[194] > [PSILLKPR]-HPC4 | LKPR-IVGG | 7.5E+02 | n.d. | 1 |
| FX ins[194] > [STPSILFTPR]-HPC4 | FTPR-IVGG | 7.1E+02 | n.d. | 1 |
| FX [191- | LDPR-IVGG | 6.2E+02 | 3.0E+02 | 2 |
| 194] > [GGGSGGGKEEEDIEFEEFESSPKPD | | | | |
| GSGGGSGGGNATLDPR]-HPC4 | | | | |
| FX [191-194] > [NATLDPR]-HPC4 | LDPR-IVGG | 6.1E+02 | n.d. | 1 |
| FX [191-194] > [NATITPR]-HPC4 | ITPR-IVGG | 4.6E+02 | 4.5E+01 | 3 |
| desGla-FX ins[194] > [HTHHAPLSPR]-HPC4 | LSPR-IVGG | 4.4E+02 | 5.8E+01 | 3 |
| FX [191-194] > [NATLKPR]-HPC4 | LKPR-IVGG | 3.7E+02 | 1.4E+02 | 4 |
| FX [191- | LDPR-IVGG | 3.5E+02 | 9.0E+01 | 3 |
| 194] > [GGGSGGGSGDPKPSSEFEEFEIDEE | | | | |
| EKGGGSGGGNATLDPR]-HPC4 | | | | |
| FX [191-194] > [NATFKPR]-HPC4 | FKPR-IVGG | 3.2E+02 | 1.1E+02 | 3 |
| desGla-FX ins[194] > [SEYQTFFNPR]-HPC4 | FNPR-IVGG | 2.8E+02 | n.d. | 1 |
| FX [191-194] > [NATLQPR]-HPC4 | LQPR-IVGG | 2.7E+02 | n.d. | 1 |
| desGla-FX ins[194] > [NESTTKIKPR]-HPC4 | IKPR-IVGG | 2.6E+02 | n.d. | 1 |
| FX [191-194] > [NATMQPR]-HPC4 | MQPR-IVGG | 1.3E+02 | 9.3E+01 | 2 |
| FX [191-194] > [NATWQPR]-HPC4 | WQPR-IVGG | 1.3E+02 | n.d. | 1 |
| desGla-FX ins[194] > [TVELQGVVPR]-HPC4 | VVPR-IVGG | 1.1E+02 | 3.0E+01 | 3 |
| desGla-FX ins[194] > [DNEEGFFSAR]-HPC4 | FSAR-IVGG | 3.6E+01 | 2.7E+00 | 3 |
| FX [191-194] > [NATIQPR]-HPC4 | IQPR-IVGG | 2.2E+01 | n.d. | 1 |
| FX [191-194] > [NATLMPR]-HPC4 | LMPR-IVGG | No Activity | n.d. | 2 |
| FX [191-194] > [NATLRPR]-HPC4 | LRPR-IVGG | No Activity | n.d. | 2 |
| FX [191-194] > [NATMMPR]-HPC4 | MMPR-IVGG | No Activity | n.d. | 1 |
| FX [191-194] > [NATMTPR]-HPC4 | MTPR-IVGG | No Activity | n.d. | 2 |
| FX [191-194] > [NATIRPR]-HPC4 | IRPR-IVGG | No Activity | n.d. | 2 |
| FX [191-194] > [NATIKPR]-HPC4 | IKPR-IVGG | No Activity | n.d. | 2 |
| FX [191-194] > [NATLEPR]-HPC4 | LEPR-IVGG | No Activity | n.d. | 1 |
| FX [191-194] > [NATDTPR]-HPC4 | DTPR-IVGG | No Activity | n.d. | 2 |
| FX-HPC4 | NLTR-IVGG | No Activity | n.d. | 3 |

TABLE 14
Kinetic Parameters for Activation of Thrombin Sensitive FX Molecules
Glyco-Conjugated with Heparosan (21, 40 and 73 kDa HEP)

| | | k_{cat} | ±S.D. | K_{M} | ±S.D. | k_{cat}/K_{M} | ±S.D. | |
|---|---|---|---|---|---|---|---|---|
| Compound Name | X₄-X_{4′} | (s⁻¹) | (s⁻¹) | (nM) | (nM) | (M⁻¹s⁻¹) | (M⁻¹s⁻¹) | n |
| FX ins[194]>[DFLAEGGGVR]-HPC4 | GGVR-IVGG | 1.2E−03 | 2.9E−04 | 645 | 323 | 2.2E+03 | 7.8E+02 | 3 |
| 21k-HEP-[N]-FX | GGVR-IVGG | 2.6E−03 | 1.0E−03 | 2154 | 1007 | 1.3E+03 | 3.2E+02 | 3 |
| ins[194]>[DFLAEGGGVR]-HPC4 | | | | | | | | |
| 40k-HEP-[N]-FX | GGVR-IVGG | 1.7E−03 | 3.7E−04 | 1315 | 630 | 1.4E+03 | 3.8E+02 | 3 |
| ins[194]>[DFLAEGGGVR]-HPC4 | | | | | | | | |
| 73k-HEP-[N]-FX | GGVR-IVGG | 9.5E−04 | 1.8E−04 | 510 | 250 | 2.0E+03 | 5.8E+02 | 3 |
| ins[194]>[DFLAEGGGVR]-HPC4 | | | | | | | | |

### Example 20

### Stimulation of Thrombin Generation in Severe Haemophilia a Patient Plasma

### Materials and Methods

[0410] The amount of thrombin generated in plasma was measured by Calibrated Automated Thrombography (Hemker et al., “Calibrated Automated Thrombin Generation Measurement in Clotting Plasma,” Pathophysiol Haemost Thromb. 33:4-15 (2003); Hemker et al., “Thrombin Generation in Plasma: Its Assessment via the Endogenous Thrombin Potential,” Thromb Haemost. 74:134-138 (1995)). In a 96-well plate, 72 μL of Factor VIII deficient plasma pool (<1% residual activity, platelet-poor) from severe haemophilia A patients lacking Factor VIII inhibitors (George King Bio-Medical, Overland Park, Kans.) was incubated with 8 μL of recombinant Factor X variant (or HEPES-BSA buffer or recombinant Factor FVIII) for 10 minutes at 37° C. Reactions were started by adding 20 μL Thrombinoscope PPP LOW Trigger (1 μM tissue-factor and 4 μM phospholipid) and mixing with 20 μL fluorogenic substrate (Z-Gly-Gly-Arg-AMC) in HEPES-BSA buffer including 0.1 M CaCl₂. All reagents were pre-warmed to 37° C. The development of a fluorescent signal at 37° C. was monitored at 20 second intervals using a Fluoroskan Ascent reader (Thermo Labsystems OY, Helsinki, Finland). Fluorescent signals were corrected by the reference signal from the thrombin calibrator samples (Hemker et al., “Calibrated Automated Thrombin Generation Measurement in Clotting Plasma,” Pathophysiol Haemost Thromb. 33:4-15 (2003)) and actual thrombin generation in nM was calculated as previously described (Hemker et al., “Thrombin Generation in Plasma: Its Assessment via the Endogenous Thrombin Potential,” Thromb Haemost. 74:134-138 (1995)). Thrombin generation parameters peak thrombin, velocity index and endogenous thrombin potential (ETP) were calculated as previously described (Hemker et al., “Data management in thrombin generation,” Thromb Res 131:3-11 (2013)).

### Results

[0411] Table 15 below sets forth the thrombin generation parameters peak thrombin, velocity index and endogenous thrombin potential determined in haemophilia A plasma in the presence of HPC4-tagged thrombin sensitive FX molecules as well as the number of determinations (n).

[0412] Several FX molecules were able to stimulate thrombin generation in haemophilia A plasma compared to buffer. The observed peak thrombin concentration in haemophilia A plasma in the presence of HPC4-tagged thrombin sensitive FX molecules ranged from 6 nM to 275 nM with buffer and 100% Factor VIII (1 IU/mL) yielding peak thrombin concentrations of 18 and 112 nM, respectively.

TABLE 15
Thrombin Generation Parameters Determined in Haemophilia A Plasma in
the Presence of 300 nM of HPC4-tagged Thrombin Sensitive FX Molecules
(or HEPES-BSA buffer or 1 IU/mL of Factor VIII)

| | | Peak | Velocity | | |
|---|---|---|---|---|---|
| | | Thrombin | Index | ETP | |
| Compound Name | X₄-X_{4′} | (nM¹) | (nM × min⁻¹) | (nM × min) | n |
| HEPES-BSA Buffer | | 18.3 | 1.1 | 489 | 1 |
| Factor VIII (1 IU/mL) | | 112 | 21 | 1248 | 1 |
| FX [191-194][NATLSPR]-HPC4 | LSPR- | 5.8 | 0.2 | 268 | 1 |
| | IVGG | | | | |
| FX [191-194] > [NATLKPR]-HPC4 | LKPR- | 12.6 | 0.6 | 402 | 1 |
| | IVGG | | | | |
| FX [191-194] > [NATMQPR]-HPC4 | MQPR- | 15.8 | 0.9 | 397 | 1 |
| | IVGG | | | | |
| FX [191-194] > [NATLQPR]-HPC4 | LQPR- | 16.3 | 0.9 | 411 | 1 |
| | IVGG | | | | |
| FX [191-194] > [NATFKPR]-HPC4 | FKPR- | 16.9 | 0.8 | 489 | 1 |
| | IVGG | | | | |
| FX [191-194] > [NATLDPR]-HPC4 | LDPR- | 18.4 | 1.1 | 493 | 1 |
| | IVGG | | | | |
| FX [191-194] > [NATWQPR]-HPC4 | WQPR- | 21.8 | 1.3 | 521 | 1 |
| | IVGG | | | | |
| FX [191-194] > [MTPR]-HPC4 | MTPR- | 33.6 | 2.5 | 626 | 1 |
| | IVGG | | | | |
| FX-HPC4 | NLTR- | 46.1 | 5.8 | 904 | 1 |
| | IVGG | | | | |
| FX ins[194] > [STPSILLKPR]-HPC4 | LKPR- | 49.9 | 3 | 1061 | 1 |
| | IVGG | | | | |
| FX [191-194] > [NATLTPR]-HPC4 | LTPR- | 53.5 | 4 | 1034 | 1 |
| | IVGG | | | | |
| FX [191- | LDPR- | 53.8 | 4.6 | 948 | 1 |
| 194] > [GGGSGGGKEEEDIEFEEF | IVGG | | | | |
| ESSPKPDGSGGGSGGGNATLDPR]- | | | | | |
| HPC4 | | | | | |
| FX ins[194] > [DFLAEGGGVR]- | GGVR- | 58.9 | 4.5 | 999 | 1 |
| HPC4 | IVGG | | | | |
| FX ins[194] > [PSILFTPR]-HPC4 | FTPR- | 70.0 | 5.8 | 1083 | 1 |
| | IVGG | | | | |
| FX [191-194] > [LTPR]-HPC4 | LTPR- | 71.7 | 5.9 | 1166 | 1 |
| | IVGG | | | | |
| FX ins[194] > [DFLAEGGGPR]- | GGPR- | 274.5 | 74.9 | 1566 | 1 |
| HPC4 | IVGG | | | | |

### Example 21

### Cloning and Expression of Thrombin Sensitive FX Molecules

### A. Cloning of Thrombin Sensitive FX Molecules

[0413] A thrombin sensitive Factor X construct (FX-FpA) cloned in the expression vector pNUT was received from INSERM (WO2004005347-A1 and Louvain-Quintard V B. et al. J Biol Chem. 2005 Dec. 16; 280(50):41352-9). The activation peptide from Factor X was inserted upstream from the FpA recognition sequence for thrombin to generate a construct encoding a protein identical to the protein described in EP2199387A1 as FX-AP-FpA (SEQ ID NO: 3). The generation of this construct was accomplished using the hereafter described cloning strategy. Using Factor X cDNA as a template, two partly overlapping PCR fragments were generated. The first PCR fragment contained a naturally occurring recognition site for the ApaI restriction enzyme located in the 3′ end of the light chain of Factor X, the sequence encoding the Factor X activation peptide and the inserted FpA sequence. The other fragment contained the sequence encoding the FpA sequence, the Factor X DNA sequence 3′ to the activation site of Factor X (Arg194-Ile195 in SEQ ID NO: 1) and included a naturally occurring recognition site for the ApaI restriction enzyme located in the heavy chain of Factor X. The two PCR fragments were mixed in a new PCR reaction to generate a DNA fragment containing the DNA sequence for the FX activation peptide fused to the FpA sequence and flanked by two ApaI restriction sites. Primers used for generating the two PCR fragments and for amplification of the fusion of the two fragments are shown in Table 16. The PCR fragment was cloned into the pNUT FX-FpA vector by digestion of both the PCR fragment and pNUT FX-FpA with ApaI and ligation of the two fragments using a Rapid DNA Ligation kit (Roche Applied Science, USA). A representation of the final construct is shown in FIG. 10.

TABLE 16
Primers Used for Generating the Two PCR Fragments
and for Amplification of the Fusion of the Two
Fragments Used in the Cloning of FX-AP-FpA

| | | SEQ | | SEQ |
|---|---|---|---|---|
| | | ID | | ID |
| | Primer S | NO | Primer AS | NO |
| PCR | GTACACCCTGGCTGA | 243 | GCATTCCTGGCCTC | 244 |
| fragment | CAACGGCAA | | CCACGATCCTCACG | |
| I | | | CCTCCTCCTTCAGCT | |
| | | | AGAAAGTCCCTGGT | |
| | | | GAGGTTGTTGTCGC | |
| PCR | GCGACAACAACCTCA | 245 | CGATGCCTGTCACG | 246 |
| fragment | CCAGGGACTTTCTAG | | AAGTAGGTGT | |
| II | CTGAAGGAGGAGGC | | | |
| | GTGAGGATCGTGGGA | | | |
| | GGCCAGGAATGC | | | |
| Fusion | GTACACCCTGGCTGA | 243 | CGATGCCTGTCACG | 246 |
| of PCR | CAACGGCAA | | AAGTAGGTGT | |
| fragments | | | | |

[0414] The full FX-AP-FpA-HPC4 cDNA and a desGla FX-AP-FpA-HPC4 cDNA were cloned into the pTT5 vector (Durocher Y. et al. Nucleic Acids Res. 2002 Jan. 15; 30(2):E9). The FX-AP-FpA CDS was sub-cloned into the pQMCF vector (Icosagen, Tartu, Estonia). Except for two sets of constructs (SEQ ID NOs: 229-236), all thrombin sensitive FX molecules were prepared by introduction of mutations into the FX-AP-FpA cDNA or derivatives of the FX-AP-FpA cDNA by either standard PCR-based site directed mutagenesis known in the art using the KOD Xtreme™ Hot Start DNA Polymerase (Novagen, Germany), followed by ligation of the DNA fragments using the In-Fusion HD Cloning Kit (Clontech, USA) or alternatively by using the QuickChange® Site-Directed Mutagenesis kit from (Stratagene, USA) by following the manufacturer's recommended instructions. For both methods primers were designed according to the manufacturer's recommendations. The two fragments that were not generated by these methods were generated by ordering of synthetic DNA sequences from Geneart (Life Technologies, USA). The ordered DNA fragments comprised a BspEI and AgeI fragment of Factor X and the desired variations in the Factor X gene. The DNA fragments were cloned into a BspEI and AgeI digested pQMCF vector using a Rapid DNA Ligation kit (Roche Applied Science, USA). The resulting variants, irrespective of cloning strategy, were in all cases expressed using the mammalian expression vector pQMCF (Icosagen, Tartu, Estonia) as a construct backbone. Introduction of the desired mutations was verified by DNA sequencing (MWG Biotech, Germany).

### B. Transfection and Expression of Thrombin Sensitive FX Molecules

[0415] A total of 10⁷CHO EBNALT85 cells (Icosagen, Estonia) were transfected with 10 μg of DNA using electroporation in a Bio-Rad Genepulser XCell™ apparatus (BioRad, USA). The transfected cells were seeded in 20 mL of QMIX1 media (a 1:1 mix of CD-CHO (Life Technologies, USA) and 293 SFM II (Life Technologies, USA) with 6 mM Glutamax and 10 mL/L of 50× HT supplement (Life Technologies, USA)) containing 5 μg/mL K-vitamin in 125 mL shake flasks (Corning, USA) immediately after transfection. The cells were cultured at 37° C., 8% CO₂ and 125 rpm in a Kuhner Climo-Shaker ISF1-X (Adolf Kuhner A G, Switzerland). A total of 10 mL fresh media and Geneticin (Life technologies, USA) to a final concentration of 700 μg/mL were added to the cells on day one or two after transfection.

[0416] Transfected CHO EBNALT85 cells were subcultured in QMIX1 media containing 5 μg/mL K-vitamin and 700 μg/mL Geneticin, by splitting the cells to a cell density of 3×10⁵ c/mL every three or four days. The culture volume was gradually increased to 100-200 mL. When viability of the transfected cells reached >90%, production was initiated by adding fresh media to the cells to a final volume of 1 L and a final cell density of 3×10⁵ c/mL. Production was performed by culturing cells for 7 days in 3 L shake flasks (Corning, USA) at 37° C., 8% CO₂ and 90 rpm. On day 3 or 4 cells were fed with 20% of the initial volume with Feed B (Life Technologies, USA) containing 6 mM Glutamax (Life Technologies, USA). On day 7, the culture media was harvested by centrifugation at 4600 rpm for 20 minutes. The supernatant was subsequently sterile filtered through a 0.22 μm Corning bottle-top vacuum filter (Corning, USA).

[0417] For larger scale production runs on a 10 L scale, CHO EBNALT85 cells transfected with FX molecule DNA were cultured in a 20 L Sartorius cultivation bag with an initial working volume of 8.5 L. The culture medium used consists of a basal medium (QMIX1 media) supplemented with 6 mM glutamine, 10 mL/L of 50× HT supplement (Life Technologies, USA)), 5 mg/L Vitamin K1, 700 mg/L Geneticin, and a feed medium, being CHO CD Efficient Feed B with 6 mM L-glutamine. The feed was supplied as a single bolus. The chosen process type for the production of the variants was a one week fed-batch process. The cultivation conditions are as follows; agitation was at 25-30 rpm with a rocking angle of 7°. Aeration was set to 5% CO₂ in air to headspace, 0.5-1 L/min and a temperature of 36.5° C. A 3% solution of Antifoam C (Sigma) was added to control foaming. Expression proceeded on the following schedule; on day 0 the seed culture was inoculated in basal medium to reach a target VCD of 0.3×10⁶ c/mL, on day 4 the feed solution was added (20% of initial volume) and on day 7 the culture was stopped and advanced to clarification. Off-line analysis of the cultures (days 0, (2), 4, (6), 7) included the following analytical assays: cell count and viability (Cedex HiRes), key metabolites (Nova Bioprofile), pH, pO₂, and pCO₂ (Siemens RapidLab/RapidPoint). Sampling for final product analysis (days 6 and 7) were taken as 2×200 μL cell-free supernatant in Micronic tubes (stored at −20° C.) and 1×1000 μL cell-free supernatant in glass HPLC vials with screw caps (stored at −20° C.). For clarification of harvest media, the harvest was filtered into sterile bags using a consecutive filter train consisting of disposable capsule filters; 3 μm Clarigard, Opticap XL10 (Millipore, USA) and 0.22 μm Durapore, Opticap XL10 (Millipore, USA). The clarified harvest was stored at 4° C. and delivered for immediate purification (or alternatively stored frozen for long term storage).

### Example 22

### Purification of Thrombin Sensitive Factor X Molecules

[0418] Typically 10 mM EDTA and 5 mM Benzamidine was added to the FX molecule harvests before being stored <72 h at +4° C. or >72 h but <14 days at −80° C. The purification was made with in-line dilution of the harvest with typically 30% Buffer A (30 mM HEPES pH 8.3, 10 mM EDTA and 5 mM Benzamidine) resulting in the starting sample having approximately a pH of 7.5 and having a conductivity of circa 10 mS/cm.

[0419] The first chromatography column was a Poros 50HQ AIEX column (GE Healthcare) equilibrated with 5 CV Buffer B (20 mM HEPES pH 7.5, 2 mM CaCl₂ and 5 mM Benzamidine). After applying the diluted harvest it was washed with 5 CV Buffer B and eluted with a step gradient to 100% elution buffer using 7 CV Buffer C (20 mM HEPES pH 7.5, 10 mM CaCl₂, 300 mM NaCl and 5 mM Benzamidine). The whole elution peak was collected and processed further.

[0420] The second chromatography step was an anti-HPC4 affinity column making use of the anti-HPC4 affinity towards the C-terminal HPC4 tag on the FX molecule. The anti-HPC4 antibody was covalently coupled to an epoxy-activated Sepharose 6B matrix (GE Healthcare) using a standard immobilisation technique. The affinity column was equilibrated with 5 CV of Buffer D (20 mM HEPES pH 7.5, 1 mM CaCl₂, 100 mM NaCl, 0.005% Tween 80 and 5 mM Benzamidine) and then the collected pool was directly loaded onto the column. The column was then washed through with 3 CV Buffer D, 4 CV Buffer E (20 mM HEPES pH 7.5, 1 mM CaCl₂, 1 M NaCl, 0.005% Tween 80 and 5 mM Benzamidine) and 3 CV Buffer D. The protein was eluted employing Buffer F (20 mM HEPES pH 7.5, 5 mM EDTA, 15 mM NaCl, 0.005% Tween 80 and 5 mM Benzamidine) and the entire elution peak was collected.

[0421] The third chromatography column was a small Poros 50HQ AIEX column (GE Healthcare), typically 5% of the CV of the previous affinity column. The Poros 50HQ AIEX column was equilibrated with Buffer B and after applying the sample, subsequently washed with Buffer B. Factor X molecules were then eluted with a step gradient employing Buffer C. The whole elution peak was collected and processed further.

[0422] As a last step an exchange of buffer using a PD-10 Desalting Column was done. The protein was applied and buffer exchanged according to the suppliers (GE Healthcare) instructions using Buffer G (10 mM MES pH 6.5, 1 mM CaCl₂ and 100 mM NaCl). The protein was then stored at −80° C.

### Example 23

### Oligonucleotide Primers Used in the Generation of Thrombin Sensitive Factor X Molecules

[0423] Table 17 below sets forth the oligonucleotide primers used for Factor X mutagenesis. The primer names correspond to the mutation, designated by the nomenclature outlined in Example 1 above, produced as a result of the mutagenesis using the primer. Primers are designated in the 5′ to 3′ direction and as either forward (-For) or reverse (-Rev) primer sets.

TABLE 17
Olionucleotide Primers for Used for Generation of Thrombin
Sensitive Factor X Molecules

| Primer Name | Primer Sequence (5′ to 3′) |
|---|---|
| desGla-FX ins[194] > [ATNATLDPR]- | GGTGAGGTTGTTGTCGCCCCTCTC |
| HPC4-For | AGGCTGCGTCTGGTTG |
| desGla-FX ins[194] > [ATNATLDPR]- | GGGGCGACAACAACCTCACCAGGA |
| HPC4 -Rev | AGGCCACCAATGCCACCCTGGATC |
| | CCAGAATCGTGGGAGGCCAGG |
| desGla-FX | GGTGAGGTTGTTGTCGCCCCTCTC |
| ins[194] > [DFLAEGGGPR]-HPC4 - | AGGCTGCGTCTGGTTG |
| For | |
| desGla-FX | GGGGCGACAACAACCTCACCAGGG |
| ins[194] > [DFLAEGGGPR]-HPC4 - | ATTTCCTGGCCGAGGGCGGCGGCC |
| Rev | CCAGAATCGTGGGAGGCCAGG |
| desGla-FX | GGTGAGGTTGTTGTCGCCCCTCTC |
| ins[194] > [DFLAEGGGVR]-HPC4 - | AGGCTGCGTCTGGTTG |
| For | |
| desGla-FX | GGGGCGACAACAACCTCACCAGGG |
| ins[194] > [DFLAEGGGVR]-HPC4 - | ATTTCCTGGCCGAGGGCGGCGGCC |
| Rev | CCAGAATCGTGGGAGGCCAGG |
| desGla-FX | GGTGAGGTTGTTGTCGCCCCTCTC |
| ins[194] > [DNEEGFFSAR]-HPC4 - | AGGCTGCGTCTGGTTG |
| For | |
| desGla-FX | GGGGCGACAACAACCTCACCAGGG |
| ins[194] > [DNEEGFFSAR]-HPC4 - | ATAATGAGGAGGGCTTCTTCAGCG |
| Rev | CCAGAATCGTGGGAGGCCAGGAAT |
| | GC |
| desGla-FX | GGTGAGGTTGTTGTCGCCCCTCTC |
| ins[194] > [DNSPSFIQIR]-HPC4-For | AGGCTGCGTCTGGTTG |
| desGla-FX | GGGGCGACAACAACCTCACCAGGG |
| ins[194] > [DNSPSFIQIR]-HPC4 - | ATAATAGCCCCAGCTTCATCCAGAT |
| Rev | CAGAATCGTGGGAGGCCAGGAATG |
| | CAAG |
| desGla-FX | GGTGAGGTTGTTGTCGCCCCTCTC |
| ins[194] > [HTHHAPLSPR]-HPC4 - | AGGCTGCGTCTGGTTG |
| For | |
| desGla-FX | GGGGCGACAACAACCTCACCAGGC |
| ins[194] > [HTHHAPLSPR]-HPC4 - | ACACCCACCACGCCCCCCTGAGCC |
| Rev | CCAGAATCGTGGGAGGCCAGG |
| desGla-FX | GGTGAGGTTGTTGTCGCCCCTCTC |
| ins[194] > [LSKNNAIEPR]-HPC4 - | AGGCTGCGTCTGGTTG |
| For | |
| desGla-FX | GGGGCGACAACAACCTCACCAGGC |
| ins[194] > [LSKNNAIEPR]-HPC4 - | TGAGCAAGAATAATGCCATCGAGC |
| Rev | CCAGAATCGTGGGAGGCCAGGAAT |
| | GCA |
| desGla-FX | CAACAACCTCACCAGGAACGAGTC |
| ins[194] > [NESTTKIKPR]-HPC4 -For | CACCACCAAGATCAAGCCCAGAAT |
| | CGTGGGAGGCCAGG |
| desGla-FX | CCTGGCCTCCCACGATTCTGGGCT |
| ins[194] > [NESTTKIKPR]-HPC4 - | TGATCTTGGTGGTGGACTCGTTCCT |
| Rev | GGTGAGGTTGTTG |
| desGla-FX | GGTGAGGTTGTTGTCGCCCCTCTC |
| ins[194] > [NRLAAALGIR]-HPC4 - | AGGCTGCGTCTGGTTG |
| For | |
| desGla-FX | GGGGCGACAACAACCTCACCAGGA |
| ins[194] > [NRLAAALGIR]-HPC4 - | ATAGACTGGCCGCCGCCCTGGGCA |
| Rev | TCAGAATCGTGGGAGGCCAGG |
| desGla-FX ins[194] > [PDNIAWYLR]- | GGTGAGGTTGTTGTCGCCCCTCTC |
| HPC4 -For | AGGCTGCGTCTGGTTG |
| desGla-FX ins[194] > [PDNIAWYLR]- | GGGGCGACAACAACCTCACCAGGC |
| HPC4 -Rev | CCGATAATATCGCCGCCTGGTACC |
| | TGAGAATCGTGGGAGGCCAGGAAT |
| | G |
| desGla-FX | CCAGACCTTCTTCAACCCCAGAATC |
| ins[194] > [SEYQTFFNPR]-HPC4 - | GTGGGAGGCCAGGAATGC |
| For | |
| desGla-FX | GTTGAAGAAGGTCTGGTACTCGCT |
| ins[194] > [SEYQTFFNPR]-HPC4 - | CCTGGTGAGGTTGTTGTCGCCC |
| Rev | |
| desGla-FX | GGTGAGGTTGTTGTCGCCCCTCTC |
| ins[194] > [STPSILPAPR]-HPC4 -For | AGGCTGCGTCTGGTTG |
| desGla-FX | GGGGCGACAACAACCTCACCAGGA |
| ins[194] > [STPSILPAPR]-HPC4 - | GCACCCCCAGCATCCTGCCCGCCC |
| Rev | CCAGAATCGTGGGAGGCCAGG |
| desGla-FX | GGTGAGGTTGTTGTCGCCCCTCTC |
| ins[194] > [TVELQGVVPR]-HPC4 - | AGGCTGCGTCTGGTTG |
| For | |
| desGla-FX | GGGGCGACAACAACCTCACCAGGA |
| ins[194] > [TVELQGVVPR]-HPC4 - | CCGTGGAGCTGCAGGGCGTGGTG |
| Rev | CCCAGAATCGTGGGAGGCCAGG |
| desGla-FX | |
| ins[194] > [YDEDENQSPR]-HPC4 - | GGTGAGGTTGTTGTCGCCCCTCTC |
| For | AGGCTGCGTCTGGTTG |
| desGla-FX | GGGGCGACAACAACCTCACCAGGT |
| ins[194] > [YDEDENQSPR]-HPC4 - | ACGATGAGGATGAGAATCAGAGCC |
| Rev | CCAGAATCGTGGGAGGCCAGGAAT |
| | GCA |
| FX [191-194] > [FTPR]-HPC4 -For | GACAACTTCACCCCCAGGATC |
| FX [191-194] > [FTPR]-HPC4 -Rev | CTGGGGGTGAAGTTGTCGCC |
| FX [191-194] > [ITPR]-HPC4 -For | AACATCACCCCCAGGATCGTGGGA |
| | GGCCAGGAA |
| FX [191-194] > [ITPR]-HPC4 -Rev | CCTGGGGGTGATGTTGTCGCCCCT |
| | CTCAGGCTGC |
| FX [191-194] > [LTPR]-HPC4 -For | GAGGGGCGACAACCTGACCCCCAG |
| | GATCG |
| FX [191-194] > [LTPR]-HPC4 -Rev | CGATCCTGGGGGTCAGGTTGTCGC |
| | CCCTC |
| FX [191-194] > [MTPR]-HPC4 -For | AACATCACCCCCAGGATCGTGGGA |
| | GGCCAGGAA |
| FX [191-194] > [MTPR]-HPC4 -Rev | CCTGGGGGTCATGTTGTCGCCCCT |
| | CTCAGGCTGC |
| FX [191-194] > [NATDTPR]-HPC4 - | CCACCGACACCCCCAGGATCGTGG |
| For | GAGGCCAGGAATGC |
| FX [191-194] > [NATDTPR]-HPC4 - | CTGGGGGTGTCGGTGGCGTTGTTG |
| Rev | TCGCCCCTCTCAGG |
| FX [191-194] > [NATFKPR]-HPC4 - | ACAACGCCACCTTCAAGCCCAGGA |
| For | T |
| FX [191-194] > [NATFKPR]-HPC4 - | ATCCTGGGCTTGAAGGTGGCGTTG |
| Rev | T |
| FX [191-194] > [NATFRPR]-HPC4 - | GCCACCTTCAGGCCCAGGATCGTG |
| For | GGAGGCCA |
| FX [191-194] > [NATFRPR]-HPC4 - | CCTGGGCCTGAAGGTGGCGTTGTT |
| Rev | GTCGCCCC |
| FX [191-194] > [NATFTPR]-HPC4 - | ACAACGCCACCTTCACCCCCAGGA |
| For | T |
| FX [191-194] > [NATFTPR]-HPC4 - | ATCCTGGGGGTGAAGGTGGCGTTG |
| Rev | T |
| FX [191-194] > [NATIKPR]-HPC4 - | CCACCATCAAGCCCAGGATCGTGG |
| For | GAGGCCAGGAATGC |
| FX [191-194] > [NATIKPR]-HPC4 - | CTGGGCTTGATGGTGGCGTTGTTG |
| Rev | TCGCCCCTCTCAGG |
| FX [191-194] > [NATIMPR]-HPC4 - | GCCACCATCATGCCCAGGATCGTG |
| For | GGAGGCCA |
| FX [191-194] > [NATIMPR]-HPC4 - | CCTGGGCATGATGGTGGCGTTGTT |
| Rev | GTCGCCCC |
| FX [191-194] > [NATIQPR]-HPC4 - | GCCACCATCCAGCCCAGGATCGTG |
| For | GGAGGCCA |
| FX [191-194] > [NATIQPR]-HPC4 - | CCTGGGCTGGATGGTGGCGTTGTT |
| Rev | GTCGCCCC |
| FX [191-194] > [NATIRPR]-HPC4 - | GCCACCATCAGGCCCAGGATCGTG |
| For | GGAGGCCA |
| FX [191-194] > [NATIRPR]-HPC4 - | CCTGGGCCTGATGGTGGCGTTGTT |
| Rev | GTCGCCCC |
| FX [191-194] > [NATITPR]-HPC4 - | GCCACCATCACCCCCAGGATCGTG |
| For | GGAGGCCA |
| FX [191-194] > [NATITPR]-HPC4 - | CCTGGGGGTGATGGTGGCGTTGTT |
| Rev | GTCGCCCC |
| FX [191-194] > [NATLDPR]-HPC4 - | CCACCCTGGACCCCAGGATCGTGG |
| For | GAGGCCAGGAATGC |
| FX [191-194] > [NATLDPR]-HPC4 - | CTGGGGTCCAGGGTGGCGTTGTTG |
| Rev | TCGCCCCTCTCAGG |
| FX [191-194] > [NATLEPR]-HPC4 - | CCACCCTGGAGCCCAGGATCGTGG |
| For | GAGGCCAGGAATGC |
| FX [191-194] > [NATLEPR]-HPC4 - | CTGGGCTCCAGGGTGGCGTTGTTG |
| Rev | TCGCCCCTCTCAGG |
| FX [191-194] > [NATLKPR]-HPC4 - | ACAACGCCACCCTGAAGCCCAGGA |
| For | T |
| FX [191-194] > [NATLKPR]-HPC4 - | ATCCTGGGCTTCAGGGTGGCGTTG |
| Rev | T |
| FX [191-194] > [NATLMPR]-HPC4 - | GCCACCCTGATGCCCAGGATCGTG |
| For | GGAGGCCA |
| FX [191-194] > [NATLMPR]-HPC4 - | CCTGGGCATCAGGGTGGCGTTGTT |
| Rev | GTCGCCCC |
| FX [191-194] > [NATLQPR]-HPC4 - | CCACCCTGCAGCCCAGGATCGTGG |
| For | GAGGCCAGGAATGC |
| FX [191-194] > [NATLQPR]-HPC4 - | CTGGGCTGCAGGGTGGCGTTGTTG |
| Rev | TCGCCCCTCTCAGG |
| FX [191-194] > [NATLRPR]-HPC4 - | GCCACCCTGAGGCCCAGGATCGTG |
| For | GGAGGCCA |
| FX [191-194] > [NATLRPR]-HPC4 - | CCTGGGCCTCAGGGTGGCGTTGTT |
| Rev | GTCGCCCC |
| FX [191-194] > [NATLSPR]-HPC4 - | GCCACCCTGTCCCCCAGGATCGTG |
| For | GGAGGCCA |
| FX [191-194] > [NATLSPR]-HPC4 - | CCTGGGGGACAGGGTGGCGTTGTT |
| Rev | GTCGCCCC |
| FX [191-194] > [NATLTPR]-HPC4 - | CCACCCTGACCCCCAGGATCGTGG |
| For | GAGGCCAGGAATGC |
| FX [191-194] > [NATLTPR]-HPC4 - | CTGGGGGTCAGGGTGGCGTTGTTG |
| Rev | TCGCCCCTCTCAGG |
| FX [191-194] > [NATMKPR]-HPC4 - | ACAACGCCACCATGAAGCCCAGGA |
| For | T |
| FX [191-194] > [NATMKPR]-HPC4 - | ATCCTGGGCTTCATGGTGGCGTTG |
| Rev | T |
| FX [191-194] > [NATMMPR]-HPC4 - | GCCACCATGATGCCCAGGATCGTG |
| For | GGAGGCCA |
| FX [191-194] > [NATMMPR]-HPC4 - | CCTGGGCATCATGGTGGCGTTGTT |
| Rev | GTCGCCCC |
| FX [191-194] > [NATMQPR]-HPC4 - | CCACCATGCAGCCCAGGATCGTGG |
| For | GAGGCCAGGAATGC |
| FX [191-194] > [NATMQPR]-HPC4 - | CTGGGCTGCATGGTGGCGTTGTTG |
| Rev | TCGCCCCTCTCAGG |
| FX [191-194] > [NATMRPR]-HPC4 - | GCCACCATGAGGCCCAGGATCGTG |
| For | GGAGGCCA |
| FX [191-194] > [NATMRPR]-HPC4 - | CCTGGGCCTCATGGTGGCGTTGTT |
| Rev | GTCGCCCC |
| FX [191-194] > [NATMTPR]-HPC4 - | GCCACCATGACCCCCAGGATCGTG |
| For | GGAGGCCA |
| FX [191-194] > [NATMTPR]-HPC4 - | CCTGGGGGTCATGGTGGCGTTGTT |
| Rev | GTCGCCCC |
| FX [191-194] > [NATWQPR]-HPC4 - | ACAACGCCACCTGGCAGCCCAGGA |
| For | T |
| FX [191-194] > [NATWQPR]-HPC4 - | ATCCTGGGCTGCCAGGTGGCGTTG |
| Rev | T |
| FX ins[194] > [DFLAEGGGPR]- | GACCAGTTCTGCCACGAGGAAC |
| HPC4 -For | |
| FX ins[194] > [DFLAEGGGPR]- | GGCCTCCCACGATCCTGGGGCCTC |
| HPC4 -Rev | CTCC |
| FX ins[194] > [PSILFKPR]-HPC4 - | ACCAGTTCTGCCACGAGGAAC |
| For | |
| FX ins[194] > [PSILFKPR]-HPC4 - | TCCCACGATTCTGGGCTTGAACAG |
| Rev | GATAGAGGGTCTGGTC |
| FX ins[194] > [PSILFTPR]-HPC4 - | ACCAGTTCTGCCACGAGGAAC |
| For | |
| FX ins[194] > [PSILFTPR]-HPC4 - | TCCCACGATTCTGGGGGTGAACAG |
| Rev | GATAGAGGGTCTGGTC |
| FX ins[194] > [PSILLKPR]-HPC4 - | CCCTCTATCCTGCTGAAGCCCAGA |
| For | ATCGTGGGAGGCCAGGAATGCAAG |
| | G |
| FX ins[194] > [PSILLKPR]-HPC4 - | CTTCAGCAGGATAGAGGGTCTGGT |
| Rev | CAGGTTGTTGTCGCCCCTC |
| FX ins[194] > [PSILLRPR]-HPC4 - | ACCAGTTCTGCCACGAGGAAC |
| For | |
| FX ins[194] > [PSILLRPR]-HPC4 - | TCCCACGATTCTGGGCCTCAGCAG |
| Rev | GATAGAGGGTCTGGTC |
| FX ins[194] > [PSILMKPR]-HPC4 - | ACCAGTTCTGCCACGAGGAAC |
| For | |
| FX ins[194] > [PSILMKPR]-HPC4 - | TCCCACGATTCTGGGCTTCATCAG |
| Rev | GATAGAGGGTCTGGTC |
| FX ins[194] > [PSILMTPR]-HPC4 - | ACCAGTTCTGCCACGAGGAAC |
| For | |
| FX ins[194] > [PSILMTPR]-HPC4 - | TCCCACGATTCTGGGGGTCATCAG |
| Rev | GATAGAGGGTCTGGTC |
| FX ins[194] > [PSILWQPR]-HPC4 - | ACCAGTTCTGCCACGAGGAAC |
| For | |
| FX ins[194] > [PSILWQPR]-HPC4 - | TCCCACGATTCTGGGCTGCCACAG |
| Rev | GATAGAGGGTCTGGTC |
| FX ins[194] > [STPSILFKPR]-HPC4 - | ACCAGTTCTGCCACGAGGAAC |
| For | |
| FX ins[194] > [STPSILFKPR]-HPC4 - | TCCCACGATTCTGGGCTTGAACAG |
| Rev | GATAGAGGGGGTAG |
| FX ins[194] > [STPSILFTPR]-HPC4 - | ACCAGTTCTGCCACGAGGAAC |
| For | |
| FX ins[194] > [STPSILFTPR]-HPC4 - | TCCCACGATTCTGGGGGTGAACAG |
| Rev | GATAGAGGGGGTAG |
| FX ins[194] > [STPSILLKPR]-HPC4 - | CCCTCTATCCTGCTGAAGCCCAGA |
| For | ATCGTGGGAGGCCAGGAATGCAAG |
| | G |
| FX ins[194] > [STPSILLKPR]-HPC4 - | CTTCAGCAGGATAGAGGGGGTAGA |
| Rev | TCTGGTCAGGTTGTTGTCGCCCCT |
| | C |
| FX ins[194] > [STPSILLRPR]-HPC4 - | ACCAGTTCTGCCACGAGGAAC |
| For | |
| FX ins[194] > [STPSILLRPR]-HPC4 - | TCCCACGATTCTGGGCCTCAGCAG |
| Rev | GATAGAGGGGGTAG |
| FX ins[194] > [STPSILMKPR]-HPC4- | ACCAGTTCTGCCACGAGGAAC |
| For | |
| FX ins[194] > [STPSILMKPR]-HPC4- | TCCCACGATTCTGGGCTTCATCAG |
| Rev | GATAGAGGGGGTAG |
| FX ins[194] > [STPSILMTPR]-HPC4- | ACCAGTTCTGCCACGAGGAAC |
| For | |
| FX ins[194] > [STPSILMTPR]-HPC4- | TCCCACGATTCTGGGGGTCATCAG |
| Rev | GATAGAGGGGGTAG |
| FX ins[194] > [STPSILWQPR]-HPC4- | ACCAGTTCTGCCACGAGGAAC |
| For | |
| FX ins[194] > [STPSILWQPR]-HPC4- | TCCCACGATTCTGGGCTGCCACAG |
| Rev | GATAGAGGGGGTAG |
| FX-HPC4 -For | CTCACCAGGATCGTGGGAGGCCAG |
| | GAATGC |
| FX-HPC4 -Rev | TCCCACGATCCTGGTGAGGTTGTT |
| | GTCGCC |

### Example 24

### Efficacy of Human Thrombin Sensitive FX Molecules in an Acute Haemophilia a Bleeding Model

[0424] FVIII deficient, FVIII-KO mice, 12-16 weeks old, male and females are divided into 3 groups of 12 animals, one for the test molecule, one negative control, and one positive control. Extra groups can be added in order to test more than one test compound. In each group, eight animals are subjected to tail bleeding and 4 animals are used in parallel for ex vivo efficacy testing using ROTEM analysis.

[0425] The mice are anaesthetised with isoflurane and placed on a heating pad. The tails are placed in pre-heated saline at 37° C. for 5 min.

[0426] Human concept molecules (wherein the concept molecule is any thrombin sensitive Factor X molecule listed in SEQ ID NO: 3-236) or vehicle or positive control (recombinant FVIII) is dosed i.v. in a dose volume of 5 ml/kg. The dose of the concept molecule is sufficient (as determined by in vitro characterisation of the concept molecule) to normalize the bleeding phenotype. The dose of the positive control, 5 U/kg recombinant FVIII, is also sufficient to normalize the bleeding phenotype.

[0427] After dosing the tail is placed back in the pre-heated saline for 5 minutes. For animals undergoing tail bleeding, a template-guided transection of the tail vein is performed exactly at the point where the tail diameter is 2.7 mm. After transection the tail is resubmerged in the pre-heated saline. Blood is collected over 60 minutes, and the haemoglobin concentration in the container is measured by spectrophotometry at 550 nm in order determine total blood loss.

[0428] Parallel animals are used for blood sampling and subsequent analysis of their clotting parameters (ex vivo efficacy). A blood sample is taken from the pen-orbital plexus with 20 μL capillary tubes without additive. The blood sample is diluted 1:10 in 0.13M sodium citrate and carefully mixed and stored at room temperature for immediate thromboelastography by ROTEM. The blood sample is re-calcified by adding 7 μL CaCl₂ to a mini cuvette (StarTEM).

[0429] Data are physically recorded throughout the experiment, aggregated and analysed in order to demonstrate the efficacy of the test molecules at reducing blood loss (tail bleeding) and clotting time (thromboelastography).

### Example 25

### Dose response study of Thrombin Sensitive FX Molecules in an Acute Haemophilia A Bleeding Model

[0430] FVIII deficient, FVIII-KO mice, 12-16 weeks old, male and females are divided into groups of 8 animals. Three to five groups are treated with increasing doses of the test molecule, one with vehicle (negative control), and one with recombinant FVIII (positive control). Further groups for extra doses of the test molecule can be added to the study.

[0431] The mice are anaesthetised with isoflurane and placed on a heating pad. The tails are placed in pre-heated saline at 37° C. for 5 min. Human concept molecules (wherein the concept molecule is any thrombin sensitive Factor X molecule listed in SEQ ID NO: 3-236), vehicle, or recombinant FVIII is dosed i.v. in a dose volume of 5 ml/kg. The doses of the test molecule are selected based on vitro characterisation in such a manner that they cover the dose/response window. The dose of the positive control, 5 U/kg recombinant FVIII, is sufficient to normalize the bleeding phenotype.

[0432] After dosing the tail is placed back in the pre-heated saline, and 5 minutes later a template-guided transection of the tail vein is performed exactly at the point where the tail diameter is 2.7 mm. The tail is resubmerged in the pre-heated saline. Blood is collected over 60 min and the haemoglobin concentration in the container is measured by spectrophotometry at 550 nm in order to determine total blood loss.

[0433] Data are physically recorded throughout the experiment, aggregated and analysed in order to determine the dose/response profile of the test molecule.

### Example 26

### Efficacy of Thrombin Sensitive FX Molecules in an Acute Haemophilia A Bleeding Model

[0434] An experiment as described in Example 24 is conducted, including an extra group of mice for each thrombin sensitive molecule to be tested (wherein the test molecule is any thrombin sensitive Factor X molecule listed in SEQ ID NO: 3-236). Recombinant FVIII is included as a positive control, vehicle as a negative, and for reference, the best concept molecule selected from experiments described in Examples 24 and 25 shall be included.

[0435] The collected data are analysed in order to demonstrate, how enhancing the activation of a thrombin sensitive FX molecule by thrombin affects blood loss and clotting time.

### Example 27

### Duration of Action of the Selected Lead Molecule(s) in an Acute Haemophilia A Bleeding Model

[0436] An experiment similar to the experiment described in Example 24 is conducted, including 8 groups of mice dosed with a single dose of the selected lead molecule (wherein the lead molecule is any thrombin sensitive Factor X molecule listed in SEQ ID NO: 3-236). The dose is selected based on the experiments described in Examples 24-26. These groups are treated i.v. at 5 minutes or 1, 3, 5, 12, 24, 48 or 72 hours prior to tail vein transection (animals for tail bleeding) or blood sampling (animals for ex vivo analysis by ROTEM). The collected data are analysed to determine blood loss (from tail bleeding) or clotting time (from ROTEM) in order to characterize the duration of action of the selected lead molecule.

### Example 28

### Verification of Efficacy in an Acute Bleeding Model of Inhibitor Complicated Haemophilia A

[0437] Female New Zealand white rabbits weighing approximately 2-3 kg are divided into 3 groups of each 8 animals. Two groups are made transiently haemophilic by i.v. administration of a monoclonal anti-FVIII-antibody (FVIII 4F30), thus mimicking the absence of FVIII activity and the presence of neutralizing antibodies found in inhibitor patients. The last group is left normal for reference. After 10 minutes, the rabbits are dosed intravenously with the test molecule (wherein the test molecule is any thrombin sensitive Factor X molecule listed in SEQ ID NO: 3-236) or vehicle, followed by induction of cuticle bleeding and a 60-minutes observation period. Blood is collected over the 60 minutes and the haemoglobin concentration in the container is measured by spectrophotometry at 550 nm in order to determine the total blood loss. Data are physically recorded throughout the experiment, aggregated, and analysed in order to demonstrate the efficacy at reducing blood loss in the inhibitor complicated haemophilia model.

### Example 29

### Establishment of the Thrombin Sensitive FX Concept as a Means of Bleeding Prophylaxis in Haemophilia A

[0438] Tolerance to human Factor X is induced by in rats with haemophilia A (FVIII-KO) by neonatal exposure to the human protein. During adolescence (from approximately 12 weeks of age), where haemophilia A rats experience spontaneous and frequently recurring bleeds, the rats are treated in a long term regimen mimicking clinical prophylaxis. The effect is assessed by monitoring the frequency and severity of bleeds as well as the resolution of their clinical manifestation. Data are analysed in order to demonstrate the effect of the test molecule as a prophylactic therapy in comparison with historic data on FVIII-KO rats undergoing on-demand treatment and/or prophylactic treatment with FVIII.

[0439] As an alternative to inducing tolerance to human Factor X, a rat specific surrogate of the test molecule can be utilized.

### Example 30

### Establishment of the Thrombin Sensitive FX Concept as a Treatment Principle in an Additional Non-Rodent Species

[0440] In addition to the rabbit study described in Example 28, pharmacodynamic experiments are conducted in dogs with haemophilia, which have accurately predicted effects as well as dosing requirements for other haemophilia treatments. The test molecule(s) (wherein the test molecule is any thrombin sensitive Factor X molecule listed in SEQ ID NO: 3-236) are administered i.v. using a dose volume of maximally 5 ml/kg in dogs with haemophilia A, at least 6 months of age. The effect is assessed ex vivo using surrogate markers, e.g. thrombelastography (as previously described in Knudsen et al. (2011) Haemophilia, 17: 962-970), or in vivo, e.g. using a standardized bleeding challenge and monitoring total blood loss, or bleeding time. Finally, test molecules may be administered to treat spontaneously bleeding dogs. In this setting, effects are monitored by assessing the resolution of clinical manifestation in comparison with historical data from an established treatment principle.

[0441] While certain features of the invention have been illustrated and described herein, many modifications, substitutions, changes, and equivalents will now occur to those of ordinary skill in the art. It is, therefore, to be understood that the appended claims are intended to cover all such modifications and changes as fall within the true spirit of the invention.

1. A thrombin sensitive Factor X molecule comprising 2 to 10 amino acid modifications N-terminally of the “IVGG” motif (amino acids 195 to 198 in SEQ ID NO: 1) in wild type Factor X, said modifications being in any of the positions X₁₀ to X₁:
X₁₀, X₉, X₈, X₇, X₆, X₅, X₄, X₃, X₂, X₁, I, V, G, G
wherein X₁₀ to X₁ can be any naturally occurring amino acid.

2. The thrombin sensitive Factor X molecule according to claim 1, wherein
X₈ is N
X₇ is N
X₆ is A
X₅ is T
X₄ is selected from the group consisting of L, I, M, F, V, P and W
X₃ is selected from the group consisting of Q, M, R, T, W, K, I, and V
X₂ is P, and
X₁ is R.

3. The thrombin sensitive Factor X molecule according to claim 1, wherein
X₈ is R
X₇ is G
X₆ is D
X₅ is N
X₄ is selected from the group consisting of L, I, M, F, W, P and W
X₃ is selected from the group consisting of T and S
X₂ is P, and
X₁ is R.

4. The thrombin sensitive Factor X molecule according to claim 1, wherein
X₉ is A
X₈ is T
X₇ is N
X₆ is A
X₅ is T
X₄ is selected from the group consisting of F, L, M, W, A, I, V and P
X₃ is selected from the group consisting of T, K, Q, P, S, Y, R, A, V, W, I and H
X₂ is P, and
X₁ is R.

5. The thrombin sensitive Factor X molecule according to claim 4, wherein X₃ is selected from the list consisting of: T, K and Q.

6. The thrombin sensitive Factor X molecule according to claim 4, wherein X₄ is selected from the list consisting of: F, L and M.

7. The thrombin sensitive Factor X molecule according to claim 4, wherein X₃ is T and X₄ is F.

8. The thrombin sensitive Factor X molecule according to claim 4, wherein X₃ is T and X₄ is M.

9. The thrombin sensitive Factor X molecule according to claim 1, wherein
X₁₀ is P
X₉ is E
X₈ is R
X₇ is G
X₆ is D
X₅ is N
X₄ is selected from the group consisting of L, I, M, F, V, P and W
X₃ is selected from the group consisting of T and S
X₂ is P, and
X₁ is R.

10. The thrombin sensitive Factor X molecule according to claim 1, wherein
X₁₀ is P
X₉ is E
X₈ is R
X₇ is G
X₆ is D
X₅ is N
X₄ is L
X₃ is T
X₂ is P, and
X₁ is R.

11. The thrombin sensitive Factor X molecule according to claim 1, wherein
X₁₀ is P
X₉ is E
X₈ is R
X₇ is N
X₆ is A
X₅ is T
X₄ is L
X₃ is T
X₂ is P, and
X₁ is R.

12. The thrombin sensitive Factor X molecule according to claim 1, wherein
X₁₀ is P
X₉ is E
X₈ is R
X₇ is G
X₆ is D
X₅ is N
X₄ is F
X₃ is T
X₂ is P, and
X₁ is R.

13. The thrombin sensitive Factor X molecule according to claim 1, wherein
X₁₀ is P
X₉ is E
X₈ is R
X₇ is G
X₆ is D
X₅ is N
X₄ is M
X₃ is T
X₂ is P, and
X₁ is R.

14. The thrombin sensitive Factor X molecule according to claim 1, wherein
X₁₀ is S
X₉ is T
X₈ is P
X₇ is S
X₆ is I
X₅ is L
X₄ is L
X₃ is K
X₂ is P, and
X₁ is R.

15. The thrombin sensitive Factor X molecule according to claim 1, wherein
X₁₀ is T
X₉ is R
X₈ is P
X₇ is S
X₆ is I
X₅ is L
X₄ is F
X₃ is T
X₂ is P, and
X₁ is R.

16. The thrombin sensitive Factor X molecule according to claim 1, wherein
X₁₀ is D
X₉ is F
X₈ is L
X₇ is A
X₆ is E
X₅ is G
X₄ is G
X₃ is G
X₂ is P, and
X₁ is R.

17. The thrombin sensitive Factor X molecule according to claim 1, wherein
X₁₀ is N
X₉ is E
X₈ is S
X₇ is T
X₆ is T
X₅ is K
X₄ is I
X₃ is K
X₂ is P, and
X₁ is R.

18. A pharmaceutical formulation comprising the thrombin sensitive Factor X molecule according to claim 1 and optionally one or more pharmaceutically acceptable excipients.

19. (canceled)

20. A method for treating a subject suffering from hemophilia, said method comprising administering to said subject a therapeutically effective amount of the pharmaceutical formulation according to claim 18.

The application's sequence listing, which the Patent Office published only in electronic form, follows.

SEQUENCE LISTING (246 sequences)

SEQ ID NO: 1 - protein, 448 aa, Homo sapiens [sequence omitted]

SEQ ID NO: 2 - protein, 14 aa, Artificial
  IVGG + the region upstream of the IVGG region in FX molecules according to the invention: X can be any naturally occurring amino acid or a specified naturally occuring amino acid
  misc_feature (1)..(10): Xaa can be any naturally occurring amino acid
XXXXXXXXXXIVGG

SEQ ID NO: 3 - protein, 458 aa, Artificial
  Recombinant
ANSFLEEMKKGHLERECMEETCSYEEAREVFEDSDKTNEFWNKYKDGDQCETSPCQNQGKCKDGLGEYTCTCLEGFEGKNCELFTRKLCSLDNGDCDQFCHEEQNSVVCSCARGYTLADNGKACIPTGPYPCGKQTLERRKRSVAQATSSSGEAPDSITWKPYDAADLDPTENPFDLLDFNQTQPERGDNNLTRDFLAEGGGVRIVGGQECKDGECPWQALLINEENEGFCGGTILSEFYILTAAHCLYQAKRFKVRVGDRNTEQEEGGEAVHEVEVVIKHNRFTKETYDFDIAVLRLKTPITFRMNVAPACLPERDWAESTLMTQKTGIVSGFGRTHEKGRQSTRLKMLEVPYVDRNSCKLSSSFIITQNMFCAGYDTKQEDACQGDSGGPHVTRFKDTYFVTGIVSWGEGCARKGKYGIYTKVTAFLKWIDRSMKTRGLPKAKSHAPEVITSSPLK

SEQ ID NO: 4 - DNA, 1374 bp, Artificial
  Recombinant
gccaattcctttcttgaagagatgaagaaaggacacctcgaaagagagtgcatggaagagacctgctcatacgaagaggcccgcgaggtctttgaggacagcgacaagacgaatgaattctggaataaatacaaagatggcgaccagtgtgagaccagtccttgccagaaccagggcaaatgtaaagacggcctcggggaatacacctgcacctgtttagaaggattcgaaggcaaaaactgtgaattattcacacggaagctctgcagcctggacaacggggactgtgaccagttctgccacgaggaacagaactctgtggtgtgctcctgcgcccgcgggtacaccctggctgacaacggcaaggcctgcattcccacagggccctacccctgtgggaaacagaccctggaacgcaggaagaggtcagtggcccaggccaccagcagcagcggggaggcccctgacagcatcacatggaagccatatgatgcagccgacctggaccccaccgagaaccccttcgacctgcttgacttcaaccagacgcagcctgagaggggcgacaacaacctcaccagggactttctagctgaaggaggaggcgtgaggatcgtgggaggccaggaatgcaaggacggggagtgtccctggcaggccctgctcatcaatgaggaaaacgagggtttctgtggtggaactattctgagcgagttctacatcctaacggcagcccactgtctctaccaagccaagagattcaaggtgagggtaggggaccggaacacggagcaggaggagggcggtgaggcggtgcacgaggtggaggtggtcatcaagcacaaccggttcacaaaggagacctatgacttcgacatcgccgtgctccggctcaagacccccatcaccttccgcatgaacgtggcgcctgcctgcctccccgagcgtgactgggccgagtccacgctgatgacgcagaagacggggattgtgagtggcttcgggcgcacccacgagaagggccggcagtccaccaggctcaagatgctggaggtgccctacgtggaccgcaacagctgcaagctgtccagcagcttcatcatcacccagaacatgttctgtgccggctacgacaccaagcaggaggatgcctgccagggggacagcgggggcccgcacgtcacccgcttcaaggacacctacttcgtgacaggcatcgtcagctggggagagggctgtgcccgtaaggggaagtacgggatctacaccaaggtcaccgccttcctcaagtggatcgacaggtccatgaaaaccaggggcttgcccaaggccaagagccatgccccggaggtcataacgtcctctccattaaaa

SEQ ID NO: 5 - DNA, 1407 bp, Artificial
  Recombinant
gccaattcctttcttgaagagatgaagaaaggacacctcgaaagagagtgcatggaagagacctgctcatacgaagaggcccgcgaggtctttgaggacagcgacaagacgaatgaattctggaataaatacaaagatggcgaccagtgtgagaccagtccttgccagaaccagggcaaatgtaaagacggcctcggggaatacacctgcacctgtttagaaggattcgaaggcaaaaactgtgaattattcacacggaagctctgcagcctggacaacggggactgtgaccagttctgccacgaggaacagaactctgtggtgtgctcctgcgcccgcgggtacaccctggctgacaacggcaaggcctgcattcccacagggccctacccctgtgggaaacagaccctggaacgcaggaagaggtcagtggcccaggccaccagcagcagcggggaggcccctgacagcatcacatggaagccatatgatgcagccgacctggaccccaccgagaaccccttcgacctgcttgacttcaaccagacgcagcctgagaggggcgacaacaacctcaccagggactttctagctgaaggaggaggcgtgaggatcgtgggaggccaggaatgcaaggacggggagtgtccctggcaggccctgctcatcaatgaggaaaacgagggtttctgtggtggaactattctgagcgagttctacatcctaacggcagcccactgtctctaccaagccaagagattcaaggtgagggtaggggaccggaacacggagcaggaggagggcggtgaggcggtgcacgaggtggaggtggtcatcaagcacaaccggttcacaaaggagacctatgacttcgacatcgccgtgctccggctcaagacccccatcaccttccgcatgaacgtggcgcctgcctgcctccccgagcgtgactgggccgagtccacgctgatgacgcagaagacggggattgtgagtggcttcgggcgcacccacgagaagggccggcagtccaccaggctcaagatgctggaggtgccctacgtggaccgcaacagctgcaagctgtccagcagcttcatcatcacccagaacatgttctgtgccggctacgacaccaagcaggaggatgcctgccagggggacagcgggggcccgcacgtcacccgcttcaaggacacctacttcgtgacaggcatcgtcagctggggagagggctgtgcccgtaaggggaagtacgggatctacaccaaggtcaccgccttcctcaagtggatcgacaggtccatgaaaaccaggggcttgcccaaggccaagagccatgccccggaggtcataacgtcctctccattaaaagaccaagtagatccgcggctcattgatgggaag

SEQ ID NO: 6 - protein, 469 aa, Artificial
  Recombinant
ANSFLEEMKKGHLERECMEETCSYEEAREVFEDSDKTNEFWNKYKDGDQCETSPCQNQGKCKDGLGEYTCTCLEGFEGKNCELFTRKLCSLDNGDCDQFCHEEQNSVVCSCARGYTLADNGKACIPTGPYPCGKQTLERRKRSVAQATSSSGEAPDSITWKPYDAADLDPTENPFDLLDFNQTQPERGDNNLTRDFLAEGGGVRIVGGQECKDGECPWQALLINEENEGFCGGTILSEFYILTAAHCLYQAKRFKVRVGDRNTEQEEGGEAVHEVEVVIKHNRFTKETYDFDIAVLRLKTPITFRMNVAPACLPERDWAESTLMTQKTGIVSGFGRTHEKGRQSTRLKMLEVPYVDRNSCKLSSSFIITQNMFCAGYDTKQEDACQGDSGGPHVTRFKDTYFVTGIVSWGEGCARKGKYGIYTKVTAFLKWIDRSMKTRGLPKAKSHAPEVITSSPLKDQVDPRLIDGK

SEQ ID NO: 7 - DNA, 1374 bp, Artificial
  Recombinant
gccaattcctttcttgaagagatgaagaaaggacacctcgaaagagagtgcatggaagagacctgctcatacgaagaggcccgcgaggtctttgaggacagcgacaagacgaatgaattctggaataaatacaaagatggcgaccagtgtgagaccagtccttgccagaaccagggcaaatgtaaagacggcctcggggaatacacctgcacctgtttagaaggattcgaaggcaaaaactgtgaattattcacacggaagctctgcagcctggacaacggggactgtgaccagttctgccacgaggaacagaactctgtggtgtgctcctgcgcccgcgggtacaccctggctgacaacggcaaggcctgcattcccacagggccctacccctgtgggaaacagaccctggaacgcaggaagaggtcagtggcccaggccaccagcagcagcggggaggcccctgacagcatcacatggaagccatatgatgcagccgacctggaccccaccgagaaccccttcgacctgcttgacttcaaccagacgcagcctgagaggggcgacaacaacctcaccagggactttctagctgaaggaggaggccccaggatcgtgggaggccaggaatgcaaggacggggagtgtccctggcaggccctgctcatcaatgaggaaaacgagggtttctgtggtggaactattctgagcgagttctacatcctaacggcagcccactgtctctaccaagccaagagattcaaggtgagggtaggggaccggaacacggagcaggaggagggcggtgaggcggtgcacgaggtggaggtggtcatcaagcacaaccggttcacaaaggagacctatgacttcgacatcgccgtgctccggctcaagacccccatcaccttccgcatgaacgtggcgcctgcctgcctccccgagcgtgactgggccgagtccacgctgatgacgcagaagacggggattgtgagtggcttcgggcgcacccacgagaagggccggcagtccaccaggctcaagatgctggaggtgccctacgtggaccgcaacagctgcaagctgtccagcagcttcatcatcacccagaacatgttctgtgccggctacgacaccaagcaggaggatgcctgccagggggacagcgggggcccgcacgtcacccgcttcaaggacacctacttcgtgacaggcatcgtcagctggggagagggctgtgcccgtaaggggaagtacgggatctacaccaaggtcaccgccttcctcaagtggatcgacaggtccatgaaaaccaggggcttgcccaaggccaagagccatgccccggaggtcataacgtcctctccattaaaa

SEQ ID NO: 8 - protein, 458 aa, Artificial
  Recombinant
ANSFLEEMKKGHLERECMEETCSYEEAREVFEDSDKTNEFWNKYKDGDQCETSPCQNQGKCKDGLGEYTCTCLEGFEGKNCELFTRKLCSLDNGDCDQFCHEEQNSVVCSCARGYTLADNGKACIPTGPYPCGKQTLERRKRSVAQATSSSGEAPDSITWKPYDAADLDPTENPFDLLDFNQTQPERGDNNLTRDFLAEGGGPRIVGGQECKDGECPWQALLINEENEGFCGGTILSEFYILTAAHCLYQAKRFKVRVGDRNTEQEEGGEAVHEVEVVIKHNRFTKETYDFDIAVLRLKTPITFRMNVAPACLPERDWAESTLMTQKTGIVSGFGRTHEKGRQSTRLKMLEVPYVDRNSCKLSSSFIITQNMFCAGYDTKQEDACQGDSGGPHVTRFKDTYFVTGIVSWGEGCARKGKYGIYTKVTAFLKWIDRSMKTRGLPKAKSHAPEVITSSPLK

SEQ ID NO: 9 - DNA, 1407 bp, Artificial
  Recominant
gccaattcctttcttgaagagatgaagaaaggacacctcgaaagagagtgcatggaagagacctgctcatacgaagaggcccgcgaggtctttgaggacagcgacaagacgaatgaattctggaataaatacaaagatggcgaccagtgtgagaccagtccttgccagaaccagggcaaatgtaaagacggcctcggggaatacacctgcacctgtttagaaggattcgaaggcaaaaactgtgaattattcacacggaagctctgcagcctggacaacggggactgtgaccagttctgccacgaggaacagaactctgtggtgtgctcctgcgcccgcgggtacaccctggctgacaacggcaaggcctgcattcccacagggccctacccctgtgggaaacagaccctggaacgcaggaagaggtcagtggcccaggccaccagcagcagcggggaggcccctgacagcatcacatggaagccatatgatgcagccgacctggaccccaccgagaaccccttcgacctgcttgacttcaaccagacgcagcctgagaggggcgacaacaacctcaccagggactttctagctgaaggaggaggccccaggatcgtgggaggccaggaatgcaaggacggggagtgtccctggcaggccctgctcatcaatgaggaaaacgagggtttctgtggtggaactattctgagcgagttctacatcctaacggcagcccactgtctctaccaagccaagagattcaaggtgagggtaggggaccggaacacggagcaggaggagggcggtgaggcggtgcacgaggtggaggtggtcatcaagcacaaccggttcacaaaggagacctatgacttcgacatcgccgtgctccggctcaagacccccatcaccttccgcatgaacgtggcgcctgcctgcctccccgagcgtgactgggccgagtccacgctgatgacgcagaagacggggattgtgagtggcttcgggcgcacccacgagaagggccggcagtccaccaggctcaagatgctggaggtgccctacgtggaccgcaacagctgcaagctgtccagcagcttcatcatcacccagaacatgttctgtgccggctacgacaccaagcaggaggatgcctgccagggggacagcgggggcccgcacgtcacccgcttcaaggacacctacttcgtgacaggcatcgtcagctggggagagggctgtgcccgtaaggggaagtacgggatctacaccaaggtcaccgccttcctcaagtggatcgacaggtccatgaaaaccaggggcttgcccaaggccaagagccatgccccggaggtcataacgtcctctccattaaaagaccaagtagatccgcggctcattgatgggaag

SEQ ID NO: 10 - protein, 469 aa, Artificial
  Recombinant
ANSFLEEMKKGHLERECMEETCSYEEAREVFEDSDKTNEFWNKYKDGDQCETSPCQNQGKCKDGLGEYTCTCLEGFEGKNCELFTRKLCSLDNGDCDQFCHEEQNSVVCSCARGYTLADNGKACIPTGPYPCGKQTLERRKRSVAQATSSSGEAPDSITWKPYDAADLDPTENPFDLLDFNQTQPERGDNNLTRDFLAEGGGPRIVGGQECKDGECPWQALLINEENEGFCGGTILSEFYILTAAHCLYQAKRFKVRVGDRNTEQEEGGEAVHEVEVVIKHNRFTKETYDFDIAVLRLKTPITFRMNVAPACLPERDWAESTLMTQKTGIVSGFGRTHEKGRQSTRLKMLEVPYVDRNSCKLSSSFIITQNMFCAGYDTKQEDACQGDSGGPHVTRFKDTYFVTGIVSWGEGCARKGKYGIYTKVTAFLKWIDRSMKTRGLPKAKSHAPEVITSSPLKDQVDPRLIDGK

SEQ ID NO: 11 - DNA, 1377 bp, Artificial
  Recombinant
gccaattcctttcttgaagagatgaagaaaggacacctcgaaagagagtgcatggaagagacctgctcatacgaagaggcccgcgaggtctttgaggacagcgacaagacgaatgaattctggaataaatacaaagatggcgaccagtgtgagaccagtccttgccagaaccagggcaaatgtaaagacggcctcggggaatacacctgcacctgtttagaaggattcgaaggcaaaaactgtgaattattcacacggaagctctgcagcctggacaacggggactgtgaccagttctgccacgaggaacagaactctgtggtgtgctcctgcgcccgcgggtacaccctggctgacaacggcaaggcctgcattcccacagggccctacccctgtgggaaacagaccctggaacgcaggaagaggtcagtggcccaggccaccagcagcagcggggaggcccctgacagcatcacatggaagccatatgatgcagccgacctggaccccaccgagaaccccttcgacctgcttgacttcaaccagacgcagcctgagaggggcgacaacaacctcaccaggatcgtgggaggccaggaatgcaaggacggggagtgtccctggcaggccctgctcatcaatgaggaaaacgagggtttctgtggtggaactattctgagcgagttctacatcctaacggcagcccactgtctctaccaagccaagagattcaaggtgagggtaggggaccggaacacggagcaggaggagggcggtgaggcggtgcacgaggtggaggtggtcatcaagcacaaccggttcacaaaggagacctatgacttcgacatcgccgtgctccggctcaagacccccatcaccttccgcatgaacgtggcgcctgcctgcctccccgagcgtgactgggccgagtccacgctgatgacgcagaagacggggattgtgagtggcttcgggcgcacccacgagaagggccggcagtccaccaggctcaagatgctggaggtgccctacgtggaccgcaacagctgcaagctgtccagcagcttcatcatcacccagaacatgttctgtgccggctacgacaccaagcaggaggatgcctgccagggggacagcgggggcccgcacgtcacccgcttcaaggacacctacttcgtgacaggcatcgtcagctggggagagggctgtgcccgtaaggggaagtacgggatctacaccaaggtcaccgccttcctcaagtggatcgacaggtccatgaaaaccaggggcttgcccaaggccaagagccatgccccggaggtcataacgtcctctccattaaaagaccaagtagatccgcggctcattgatgggaag

SEQ ID NO: 12 - protein, 459 aa, Artificial
  Recombinant
ANSFLEEMKKGHLERECMEETCSYEEAREVFEDSDKTNEFWNKYKDGDQCETSPCQNQGKCKDGLGEYTCTCLEGFEGKNCELFTRKLCSLDNGDCDQFCHEEQNSVVCSCARGYTLADNGKACIPTGPYPCGKQTLERRKRSVAQATSSSGEAPDSITWKPYDAADLDPTENPFDLLDFNQTQPERGDNNLTRIVGGQECKDGECPWQALLINEENEGFCGGTILSEFYILTAAHCLYQAKRFKVRVGDRNTEQEEGGEAVHEVEVVIKHNRFTKETYDFDIAVLRLKTPITFRMNVAPACLPERDWAESTLMTQKTGIVSGFGRTHEKGRQSTRLKMLEVPYVDRNSCKLSSSFIITQNMFCAGYDTKQEDACQGDSGGPHVTRFKDTYFVTGIVSWGEGCARKGKYGIYTKVTAFLKWIDRSMKTRGLPKAKSHAPEVITSSPLKDQVDPRLIDGK

SEQ ID NO: 13 - DNA, 1386 bp, Artificial
  Recombinant
gccaattcctttcttgaagagatgaagaaaggacacctcgaaagagagtgcatggaagagacctgctcatacgaagaggcccgcgaggtctttgaggacagcgacaagacgaatgaattctggaataaatacaaagatggcgaccagtgtgagaccagtccttgccagaaccagggcaaatgtaaagacggcctcggggaatacacctgcacctgtttagaaggattcgaaggcaaaaactgtgaattattcacacggaagctctgcagcctggacaacggggactgtgaccagttctgccacgaggaacagaactctgtggtgtgctcctgcgcccgcgggtacaccctggctgacaacggcaaggcctgcattcccacagggccctacccctgtgggaaacagaccctggaacgcaggaagaggtcagtggcccaggccaccagcagcagcggggaggcccctgacagcatcacatggaagccatatgatgcagccgacctggaccccaccgagaaccccttcgacctgcttgacttcaaccagacgcagcctgagaggggcgacaacaacgccaccctgatgcccaggatcgtgggaggccaggaatgcaaggacggggagtgtccctggcaggccctgctcatcaatgaggaaaacgagggtttctgtggtggaactattctgagcgagttctacatcctaacggcagcccactgtctctaccaagccaagagattcaaggtgagggtaggggaccggaacacggagcaggaggagggcggtgaggcggtgcacgaggtggaggtggtcatcaagcacaaccggttcacaaaggagacctatgacttcgacatcgccgtgctccggctcaagacccccatcaccttccgcatgaacgtggcgcctgcctgcctccccgagcgtgactgggccgagtccacgctgatgacgcagaagacggggattgtgagtggcttcgggcgcacccacgagaagggccggcagtccaccaggctcaagatgctggaggtgccctacgtggaccgcaacagctgcaagctgtccagcagcttcatcatcacccagaacatgttctgtgccggctacgacaccaagcaggaggatgcctgccagggggacagcgggggcccgcacgtcacccgcttcaaggacacctacttcgtgacaggcatcgtcagctggggagagggctgtgcccgtaaggggaagtacgggatctacaccaaggtcaccgccttcctcaagtggatcgacaggtccatgaaaaccaggggcttgcccaaggccaagagccatgccccggaggtcataacgtcctctccattaaaagaccaagtagatccgcggctcattgatgggaag

SEQ ID NO: 14 - protein, 462 aa, Artificial
  Recombinant
ANSFLEEMKKGHLERECMEETCSYEEAREVFEDSDKTNEFWNKYKDGDQCETSPCQNQGKCKDGLGEYTCTCLEGFEGKNCELFTRKLCSLDNGDCDQFCHEEQNSVVCSCARGYTLADNGKACIPTGPYPCGKQTLERRKRSVAQATSSSGEAPDSITWKPYDAADLDPTENPFDLLDFNQTQPERGDNNATLMPRIVGGQECKDGECPWQALLINEENEGFCGGTILSEFYILTAAHCLYQAKRFKVRVGDRNTEQEEGGEAVHEVEVVIKHNRFTKETYDFDIAVLRLKTPITFRMNVAPACLPERDWAESTLMTQKTGIVSGFGRTHEKGRQSTRLKMLEVPYVDRNSCKLSSSFIITQNMFCAGYDTKQEDACQGDSGGPHVTRFKDTYFVTGIVSWGEGCARKGKYGIYTKVTAFLKWIDRSMKTRGLPKAKSHAPEVITSSPLKDQVDPRLIDGK

SEQ ID NO: 15 - DNA, 1353 bp, Artificial
  Recombinant
gccaattcctttcttgaagagatgaagaaaggacacctcgaaagagagtgcatggaagagacctgctcatacgaagaggcccgcgaggtctttgaggacagcgacaagacgaatgaattctggaataaatacaaagatggcgaccagtgtgagaccagtccttgccagaaccagggcaaatgtaaagacggcctcggggaatacacctgcacctgtttagaaggattcgaaggcaaaaactgtgaattattcacacggaagctctgcagcctggacaacggggactgtgaccagttctgccacgaggaacagaactctgtggtgtgctcctgcgcccgcgggtacaccctggctgacaacggcaaggcctgcattcccacagggccctacccctgtgggaaacagaccctggaacgcaggaagaggtcagtggcccaggccaccagcagcagcggggaggcccctgacagcatcacatggaagccatatgatgcagccgacctggaccccaccgagaaccccttcgacctgcttgacttcaaccagacgcagcctgagaggggcgacaacaacgccaccctgatgcccaggatcgtgggaggccaggaatgcaaggacggggagtgtccctggcaggccctgctcatcaatgaggaaaacgagggtttctgtggtggaactattctgagcgagttctacatcctaacggcagcccactgtctctaccaagccaagagattcaaggtgagggtaggggaccggaacacggagcaggaggagggcggtgaggcggtgcacgaggtggaggtggtcatcaagcacaaccggttcacaaaggagacctatgacttcgacatcgccgtgctccggctcaagacccccatcaccttccgcatgaacgtggcgcctgcctgcctccccgagcgtgactgggccgagtccacgctgatgacgcagaagacggggattgtgagtggcttcgggcgcacccacgagaagggccggcagtccaccaggctcaagatgctggaggtgccctacgtggaccgcaacagctgcaagctgtccagcagcttcatcatcacccagaacatgttctgtgccggctacgacaccaagcaggaggatgcctgccagggggacagcgggggcccgcacgtcacccgcttcaaggacacctacttcgtgacaggcatcgtcagctggggagagggctgtgcccgtaaggggaagtacgggatctacaccaaggtcaccgccttcctcaagtggatcgacaggtccatgaaaaccaggggcttgcccaaggccaagagccatgccccggaggtcataacgtcctctccattaaaa

SEQ ID NO: 16 - protein, 451 aa, Artificial
  Recombinant
ANSFLEEMKKGHLERECMEETCSYEEAREVFEDSDKTNEFWNKYKDGDQCETSPCQNQGKCKDGLGEYTCTCLEGFEGKNCELFTRKLCSLDNGDCDQFCHEEQNSVVCSCARGYTLADNGKACIPTGPYPCGKQTLERRKRSVAQATSSSGEAPDSITWKPYDAADLDPTENPFDLLDFNQTQPERGDNNATLMPRIVGGQECKDGECPWQALLINEENEGFCGGTILSEFYILTAAHCLYQAKRFKVRVGDRNTEQEEGGEAVHEVEVVIKHNRFTKETYDFDIAVLRLKTPITFRMNVAPACLPERDWAESTLMTQKTGIVSGFGRTHEKGRQSTRLKMLEVPYVDRNSCKLSSSFIITQNMFCAGYDTKQEDACQGDSGGPHVTRFKDTYFVTGIVSWGEGCARKGKYGIYTKVTAFLKWIDRSMKTRGLPKAKSHAPEVITSSPLK

SEQ ID NO: 17 - DNA, 1386 bp, Artificial
  Recombinant
gccaattcctttcttgaagagatgaagaaaggacacctcgaaagagagtgcatggaagagacctgctcatacgaagaggcccgcgaggtctttgaggacagcgacaagacgaatgaattctggaataaatacaaagatggcgaccagtgtgagaccagtccttgccagaaccagggcaaatgtaaagacggcctcggggaatacacctgcacctgtttagaaggattcgaaggcaaaaactgtgaattattcacacggaagctctgcagcctggacaacggggactgtgaccagttctgccacgaggaacagaactctgtggtgtgctcctgcgcccgcgggtacaccctggctgacaacggcaaggcctgcattcccacagggccctacccctgtgggaaacagaccctggaacgcaggaagaggtcagtggcccaggccaccagcagcagcggggaggcccctgacagcatcacatggaagccatatgatgcagccgacctggaccccaccgagaaccccttcgacctgcttgacttcaaccagacgcagcctgagaggggcgacaacaacgccaccctgaggcccaggatcgtgggaggccaggaatgcaaggacggggagtgtccctggcaggccctgctcatcaatgaggaaaacgagggtttctgtggtggaactattctgagcgagttctacatcctaacggcagcccactgtctctaccaagccaagagattcaaggtgagggtaggggaccggaacacggagcaggaggagggcggtgaggcggtgcacgaggtggaggtggtcatcaagcacaaccggttcacaaaggagacctatgacttcgacatcgccgtgctccggctcaagacccccatcaccttccgcatgaacgtggcgcctgcctgcctccccgagcgtgactgggccgagtccacgctgatgacgcagaagacggggattgtgagtggcttcgggcgcacccacgagaagggccggcagtccaccaggctcaagatgctggaggtgccctacgtggaccgcaacagctgcaagctgtccagcagcttcatcatcacccagaacatgttctgtgccggctacgacaccaagcaggaggatgcctgccagggggacagcgggggcccgcacgtcacccgcttcaaggacacctacttcgtgacaggcatcgtcagctggggagagggctgtgcccgtaaggggaagtacgggatctacaccaaggtcaccgccttcctcaagtggatcgacaggtccatgaaaaccaggggcttgcccaaggccaagagccatgccccggaggtcataacgtcctctccattaaaagaccaagtagatccgcggctcattgatgggaag

SEQ ID NO: 18 - protein, 462 aa, Artificial
  Recombinant
ANSFLEEMKKGHLERECMEETCSYEEAREVFEDSDKTNEFWNKYKDGDQCETSPCQNQGKCKDGLGEYTCTCLEGFEGKNCELFTRKLCSLDNGDCDQFCHEEQNSVVCSCARGYTLADNGKACIPTGPYPCGKQTLERRKRSVAQATSSSGEAPDSITWKPYDAADLDPTENPFDLLDFNQTQPERGDNNATLRPRIVGGQECKDGECPWQALLINEENEGFCGGTILSEFYILTAAHCLYQAKRFKVRVGDRNTEQEEGGEAVHEVEVVIKHNRFTKETYDFDIAVLRLKTPITFRMNVAPACLPERDWAESTLMTQKTGIVSGFGRTHEKGRQSTRLKMLEVPYVDRNSCKLSSSFIITQNMFCAGYDTKQEDACQGDSGGPHVTRFKDTYFVTGIVSWGEGCARKGKYGIYTKVTAFLKWIDRSMKTRGLPKAKSHAPEVITSSPLKDQVDPRLIDGK

SEQ ID NO: 19 - DNA, 1353 bp, Artificial
  Recombinant
gccaattcctttcttgaagagatgaagaaaggacacctcgaaagagagtgcatggaagagacctgctcatacgaagaggcccgcgaggtctttgaggacagcgacaagacgaatgaattctggaataaatacaaagatggcgaccagtgtgagaccagtccttgccagaaccagggcaaatgtaaagacggcctcggggaatacacctgcacctgtttagaaggattcgaaggcaaaaactgtgaattattcacacggaagctctgcagcctggacaacggggactgtgaccagttctgccacgaggaacagaactctgtggtgtgctcctgcgcccgcgggtacaccctggctgacaacggcaaggcctgcattcccacagggccctacccctgtgggaaacagaccctggaacgcaggaagaggtcagtggcccaggccaccagcagcagcggggaggcccctgacagcatcacatggaagccatatgatgcagccgacctggaccccaccgagaaccccttcgacctgcttgacttcaaccagacgcagcctgagaggggcgacaacaacgccaccctgaggcccaggatcgtgggaggccaggaatgcaaggacggggagtgtccctggcaggccctgctcatcaatgaggaaaacgagggtttctgtggtggaactattctgagcgagttctacatcctaacggcagcccactgtctctaccaagccaagagattcaaggtgagggtaggggaccggaacacggagcaggaggagggcggtgaggcggtgcacgaggtggaggtggtcatcaagcacaaccggttcacaaaggagacctatgacttcgacatcgccgtgctccggctcaagacccccatcaccttccgcatgaacgtggcgcctgcctgcctccccgagcgtgactgggccgagtccacgctgatgacgcagaagacggggattgtgagtggcttcgggcgcacccacgagaagggccggcagtccaccaggctcaagatgctggaggtgccctacgtggaccgcaacagctgcaagctgtccagcagcttcatcatcacccagaacatgttctgtgccggctacgacaccaagcaggaggatgcctgccagggggacagcgggggcccgcacgtcacccgcttcaaggacacctacttcgtgacaggcatcgtcagctggggagagggctgtgcccgtaaggggaagtacgggatctacaccaaggtcaccgccttcctcaagtggatcgacaggtccatgaaaaccaggggcttgcccaaggccaagagccatgccccggaggtcataacgtcctctccattaaaa

SEQ ID NO: 20 - protein, 451 aa, Artificial
  Recombinant
ANSFLEEMKKGHLERECMEETCSYEEAREVFEDSDKTNEFWNKYKDGDQCETSPCQNQGKCKDGLGEYTCTCLEGFEGKNCELFTRKLCSLDNGDCDQFCHEEQNSVVCSCARGYTLADNGKACIPTGPYPCGKQTLERRKRSVAQATSSSGEAPDSITWKPYDAADLDPTENPFDLLDFNQTQPERGDNNATLRPRIVGGQECKDGECPWQALLINEENEGFCGGTILSEFYILTAAHCLYQAKRFKVRVGDRNTEQEEGGEAVHEVEVVIKHNRFTKETYDFDIAVLRLKTPITFRMNVAPACLPERDWAESTLMTQKTGIVSGFGRTHEKGRQSTRLKMLEVPYVDRNSCKLSSSFIITQNMFCAGYDTKQEDACQGDSGGPHVTRFKDTYFVTGIVSWGEGCARKGKYGIYTKVTAFLKWIDRSMKTRGLPKAKSHAPEVITSSPLK

SEQ ID NO: 21 - DNA, 1386 bp, Artificial
  Recombinant
gccaattcctttcttgaagagatgaagaaaggacacctcgaaagagagtgcatggaagagacctgctcatacgaagaggcccgcgaggtctttgaggacagcgacaagacgaatgaattctggaataaatacaaagatggcgaccagtgtgagaccagtccttgccagaaccagggcaaatgtaaagacggcctcggggaatacacctgcacctgtttagaaggattcgaaggcaaaaactgtgaattattcacacggaagctctgcagcctggacaacggggactgtgaccagttctgccacgaggaacagaactctgtggtgtgctcctgcgcccgcgggtacaccctggctgacaacggcaaggcctgcattcccacagggccctacccctgtgggaaacagaccctggaacgcaggaagaggtcagtggcccaggccaccagcagcagcggggaggcccctgacagcatcacatggaagccatatgatgcagccgacctggaccccaccgagaaccccttcgacctgcttgacttcaaccagacgcagcctgagaggggcgacaacaacgccaccatgatgcccaggatcgtgggaggccaggaatgcaaggacggggagtgtccctggcaggccctgctcatcaatgaggaaaacgagggtttctgtggtggaactattctgagcgagttctacatcctaacggcagcccactgtctctaccaagccaagagattcaaggtgagggtaggggaccggaacacggagcaggaggagggcggtgaggcggtgcacgaggtggaggtggtcatcaagcacaaccggttcacaaaggagacctatgacttcgacatcgccgtgctccggctcaagacccccatcaccttccgcatgaacgtggcgcctgcctgcctccccgagcgtgactgggccgagtccacgctgatgacgcagaagacggggattgtgagtggcttcgggcgcacccacgagaagggccggcagtccaccaggctcaagatgctggaggtgccctacgtggaccgcaacagctgcaagctgtccagcagcttcatcatcacccagaacatgttctgtgccggctacgacaccaagcaggaggatgcctgccagggggacagcgggggcccgcacgtcacccgcttcaaggacacctacttcgtgacaggcatcgtcagctggggagagggctgtgcccgtaaggggaagtacgggatctacaccaaggtcaccgccttcctcaagtggatcgacaggtccatgaaaaccaggggcttgcccaaggccaagagccatgccccggaggtcataacgtcctctccattaaaagaccaagtagatccgcggctcattgatgggaag

SEQ ID NO: 22 - protein, 462 aa, Artificial
  Recombinant
ANSFLEEMKKGHLERECMEETCSYEEAREVFEDSDKTNEFWNKYKDGDQCETSPCQNQGKCKDGLGEYTCTCLEGFEGKNCELFTRKLCSLDNGDCDQFCHEEQNSVVCSCARGYTLADNGKACIPTGPYPCGKQTLERRKRSVAQATSSSGEAPDSITWKPYDAADLDPTENPFDLLDFNQTQPERGDNNATMMPRIVGGQECKDGECPWQALLINEENEGFCGGTILSEFYILTAAHCLYQAKRFKVRVGDRNTEQEEGGEAVHEVEVVIKHNRFTKETYDFDIAVLRLKTPITFRMNVAPACLPERDWAESTLMTQKTGIVSGFGRTHEKGRQSTRLKMLEVPYVDRNSCKLSSSFIITQNMFCAGYDTKQEDACQGDSGGPHVTRFKDTYFVTGIVSWGEGCARKGKYGIYTKVTAFLKWIDRSMKTRGLPKAKSHAPEVITSSPLKDQVDPRLIDGK

SEQ ID NO: 23 - DNA, 1353 bp, Artificial
  Recombinant
gccaattcctttcttgaagagatgaagaaaggacacctcgaaagagagtgcatggaagagacctgctcatacgaagaggcccgcgaggtctttgaggacagcgacaagacgaatgaattctggaataaatacaaagatggcgaccagtgtgagaccagtccttgccagaaccagggcaaatgtaaagacggcctcggggaatacacctgcacctgtttagaaggattcgaaggcaaaaactgtgaattattcacacggaagctctgcagcctggacaacggggactgtgaccagttctgccacgaggaacagaactctgtggtgtgctcctgcgcccgcgggtacaccctggctgacaacggcaaggcctgcattcccacagggccctacccctgtgggaaacagaccctggaacgcaggaagaggtcagtggcccaggccaccagcagcagcggggaggcccctgacagcatcacatggaagccatatgatgcagccgacctggaccccaccgagaaccccttcgacctgcttgacttcaaccagacgcagcctgagaggggcgacaacaacgccaccatgatgcccaggatcgtgggaggccaggaatgcaaggacggggagtgtccctggcaggccctgctcatcaatgaggaaaacgagggtttctgtggtggaactattctgagcgagttctacatcctaacggcagcccactgtctctaccaagccaagagattcaaggtgagggtaggggaccggaacacggagcaggaggagggcggtgaggcggtgcacgaggtggaggtggtcatcaagcacaaccggttcacaaaggagacctatgacttcgacatcgccgtgctccggctcaagacccccatcaccttccgcatgaacgtggcgcctgcctgcctccccgagcgtgactgggccgagtccacgctgatgacgcagaagacggggattgtgagtggcttcgggcgcacccacgagaagggccggcagtccaccaggctcaagatgctggaggtgccctacgtggaccgcaacagctgcaagctgtccagcagcttcatcatcacccagaacatgttctgtgccggctacgacaccaagcaggaggatgcctgccagggggacagcgggggcccgcacgtcacccgcttcaaggacacctacttcgtgacaggcatcgtcagctggggagagggctgtgcccgtaaggggaagtacgggatctacaccaaggtcaccgccttcctcaagtggatcgacaggtccatgaaaaccaggggcttgcccaaggccaagagccatgccccggaggtcataacgtcctctccattaaaa

SEQ ID NO: 24 - protein, 451 aa, Artificial
  Recombinant
ANSFLEEMKKGHLERECMEETCSYEEAREVFEDSDKTNEFWNKYKDGDQCETSPCQNQGKCKDGLGEYTCTCLEGFEGKNCELFTRKLCSLDNGDCDQFCHEEQNSVVCSCARGYTLADNGKACIPTGPYPCGKQTLERRKRSVAQATSSSGEAPDSITWKPYDAADLDPTENPFDLLDFNQTQPERGDNNATMMPRIVGGQECKDGECPWQALLINEENEGFCGGTILSEFYILTAAHCLYQAKRFKVRVGDRNTEQEEGGEAVHEVEVVIKHNRFTKETYDFDIAVLRLKTPITFRMNVAPACLPERDWAESTLMTQKTGIVSGFGRTHEKGRQSTRLKMLEVPYVDRNSCKLSSSFIITQNMFCAGYDTKQEDACQGDSGGPHVTRFKDTYFVTGIVSWGEGCARKGKYGIYTKVTAFLKWIDRSMKTRGLPKAKSHAPEVITSSPLK

SEQ ID NO: 25 - DNA, 1386 bp, Artificial
  Recombinant
gccaattcctttcttgaagagatgaagaaaggacacctcgaaagagagtgcatggaagagacctgctcatacgaagaggcccgcgaggtctttgaggacagcgacaagacgaatgaattctggaataaatacaaagatggcgaccagtgtgagaccagtccttgccagaaccagggcaaatgtaaagacggcctcggggaatacacctgcacctgtttagaaggattcgaaggcaaaaactgtgaattattcacacggaagctctgcagcctggacaacggggactgtgaccagttctgccacgaggaacagaactctgtggtgtgctcctgcgcccgcgggtacaccctggctgacaacggcaaggcctgcattcccacagggccctacccctgtgggaaacagaccctggaacgcaggaagaggtcagtggcccaggccaccagcagcagcggggaggcccctgacagcatcacatggaagccatatgatgcagccgacctggaccccaccgagaaccccttcgacctgcttgacttcaaccagacgcagcctgagaggggcgacaacaacgccaccatgaggcccaggatcgtgggaggccaggaatgcaaggacggggagtgtccctggcaggccctgctcatcaatgaggaaaacgagggtttctgtggtggaactattctgagcgagttctacatcctaacggcagcccactgtctctaccaagccaagagattcaaggtgagggtaggggaccggaacacggagcaggaggagggcggtgaggcggtgcacgaggtggaggtggtcatcaagcacaaccggttcacaaaggagacctatgacttcgacatcgccgtgctccggctcaagacccccatcaccttccgcatgaacgtggcgcctgcctgcctccccgagcgtgactgggccgagtccacgctgatgacgcagaagacggggattgtgagtggcttcgggcgcacccacgagaagggccggcagtccaccaggctcaagatgctggaggtgccctacgtggaccgcaacagctgcaagctgtccagcagcttcatcatcacccagaacatgttctgtgccggctacgacaccaagcaggaggatgcctgccagggggacagcgggggcccgcacgtcacccgcttcaaggacacctacttcgtgacaggcatcgtcagctggggagagggctgtgcccgtaaggggaagtacgggatctacaccaaggtcaccgccttcctcaagtggatcgacaggtccatgaaaaccaggggcttgcccaaggccaagagccatgccccggaggtcataacgtcctctccattaaaagaccaagtagatccgcggctcattgatgggaag

SEQ ID NO: 26 - protein, 462 aa, Artificial
  Recombinant
ANSFLEEMKKGHLERECMEETCSYEEAREVFEDSDKTNEFWNKYKDGDQCETSPCQNQGKCKDGLGEYTCTCLEGFEGKNCELFTRKLCSLDNGDCDQFCHEEQNSVVCSCARGYTLADNGKACIPTGPYPCGKQTLERRKRSVAQATSSSGEAPDSITWKPYDAADLDPTENPFDLLDFNQTQPERGDNNATMRPRIVGGQECKDGECPWQALLINEENEGFCGGTILSEFYILTAAHCLYQAKRFKVRVGDRNTEQEEGGEAVHEVEVVIKHNRFTKETYDFDIAVLRLKTPITFRMNVAPACLPERDWAESTLMTQKTGIVSGFGRTHEKGRQSTRLKMLEVPYVDRNSCKLSSSFIITQNMFCAGYDTKQEDACQGDSGGPHVTRFKDTYFVTGIVSWGEGCARKGKYGIYTKVTAFLKWIDRSMKTRGLPKAKSHAPEVITSSPLKDQVDPRLIDGK

SEQ ID NO: 27 - DNA, 1353 bp, Artificial
  Recombinant
gccaattcctttcttgaagagatgaagaaaggacacctcgaaagagagtgcatggaagagacctgctcatacgaagaggcccgcgaggtctttgaggacagcgacaagacgaatgaattctggaataaatacaaagatggcgaccagtgtgagaccagtccttgccagaaccagggcaaatgtaaagacggcctcggggaatacacctgcacctgtttagaaggattcgaaggcaaaaactgtgaattattcacacggaagctctgcagcctggacaacggggactgtgaccagttctgccacgaggaacagaactctgtggtgtgctcctgcgcccgcgggtacaccctggctgacaacggcaaggcctgcattcccacagggccctacccctgtgggaaacagaccctggaacgcaggaagaggtcagtggcccaggccaccagcagcagcggggaggcccctgacagcatcacatggaagccatatgatgcagccgacctggaccccaccgagaaccccttcgacctgcttgacttcaaccagacgcagcctgagaggggcgacaacaacgccaccatgaggcccaggatcgtgggaggccaggaatgcaaggacggggagtgtccctggcaggccctgctcatcaatgaggaaaacgagggtttctgtggtggaactattctgagcgagttctacatcctaacggcagcccactgtctctaccaagccaagagattcaaggtgagggtaggggaccggaacacggagcaggaggagggcggtgaggcggtgcacgaggtggaggtggtcatcaagcacaaccggttcacaaaggagacctatgacttcgacatcgccgtgctccggctcaagacccccatcaccttccgcatgaacgtggcgcctgcctgcctccccgagcgtgactgggccgagtccacgctgatgacgcagaagacggggattgtgagtggcttcgggcgcacccacgagaagggccggcagtccaccaggctcaagatgctggaggtgccctacgtggaccgcaacagctgcaagctgtccagcagcttcatcatcacccagaacatgttctgtgccggctacgacaccaagcaggaggatgcctgccagggggacagcgggggcccgcacgtcacccgcttcaaggacacctacttcgtgacaggcatcgtcagctggggagagggctgtgcccgtaaggggaagtacgggatctacaccaaggtcaccgccttcctcaagtggatcgacaggtccatgaaaaccaggggcttgcccaaggccaagagccatgccccggaggtcataacgtcctctccattaaaa

SEQ ID NO: 28 - protein, 451 aa, Artificial
  Recombinant
ANSFLEEMKKGHLERECMEETCSYEEAREVFEDSDKTNEFWNKYKDGDQCETSPCQNQGKCKDGLGEYTCTCLEGFEGKNCELFTRKLCSLDNGDCDQFCHEEQNSVVCSCARGYTLADNGKACIPTGPYPCGKQTLERRKRSVAQATSSSGEAPDSITWKPYDAADLDPTENPFDLLDFNQTQPERGDNNATMRPRIVGGQECKDGECPWQALLINEENEGFCGGTILSEFYILTAAHCLYQAKRFKVRVGDRNTEQEEGGEAVHEVEVVIKHNRFTKETYDFDIAVLRLKTPITFRMNVAPACLPERDWAESTLMTQKTGIVSGFGRTHEKGRQSTRLKMLEVPYVDRNSCKLSSSFIITQNMFCAGYDTKQEDACQGDSGGPHVTRFKDTYFVTGIVSWGEGCARKGKYGIYTKVTAFLKWIDRSMKTRGLPKAKSHAPEVITSSPLK

SEQ ID NO: 29 - DNA, 1386 bp, Artificial
  Recombinant
gccaattcctttcttgaagagatgaagaaaggacacctcgaaagagagtgcatggaagagacctgctcatacgaagaggcccgcgaggtctttgaggacagcgacaagacgaatgaattctggaataaatacaaagatggcgaccagtgtgagaccagtccttgccagaaccagggcaaatgtaaagacggcctcggggaatacacctgcacctgtttagaaggattcgaaggcaaaaactgtgaattattcacacggaagctctgcagcctggacaacggggactgtgaccagttctgccacgaggaacagaactctgtggtgtgctcctgcgcccgcgggtacaccctggctgacaacggcaaggcctgcattcccacagggccctacccctgtgggaaacagaccctggaacgcaggaagaggtcagtggcccaggccaccagcagcagcggggaggcccctgacagcatcacatggaagccatatgatgcagccgacctggaccccaccgagaaccccttcgacctgcttgacttcaaccagacgcagcctgagaggggcgacaacaacgccaccatgacccccaggatcgtgggaggccaggaatgcaaggacggggagtgtccctggcaggccctgctcatcaatgaggaaaacgagggtttctgtggtggaactattctgagcgagttctacatcctaacggcagcccactgtctctaccaagccaagagattcaaggtgagggtaggggaccggaacacggagcaggaggagggcggtgaggcggtgcacgaggtggaggtggtcatcaagcacaaccggttcacaaaggagacctatgacttcgacatcgccgtgctccggctcaagacccccatcaccttccgcatgaacgtggcgcctgcctgcctccccgagcgtgactgggccgagtccacgctgatgacgcagaagacggggattgtgagtggcttcgggcgcacccacgagaagggccggcagtccaccaggctcaagatgctggaggtgccctacgtggaccgcaacagctgcaagctgtccagcagcttcatcatcacccagaacatgttctgtgccggctacgacaccaagcaggaggatgcctgccagggggacagcgggggcccgcacgtcacccgcttcaaggacacctacttcgtgacaggcatcgtcagctggggagagggctgtgcccgtaaggggaagtacgggatctacaccaaggtcaccgccttcctcaagtggatcgacaggtccatgaaaaccaggggcttgcccaaggccaagagccatgccccggaggtcataacgtcctctccattaaaagaccaagtagatccgcggctcattgatgggaag

SEQ ID NO: 30 - protein, 462 aa, Artificial
  Recombinant
ANSFLEEMKKGHLERECMEETCSYEEAREVFEDSDKTNEFWNKYKDGDQCETSPCQNQGKCKDGLGEYTCTCLEGFEGKNCELFTRKLCSLDNGDCDQFCHEEQNSVVCSCARGYTLADNGKACIPTGPYPCGKQTLERRKRSVAQATSSSGEAPDSITWKPYDAADLDPTENPFDLLDFNQTQPERGDNNATMTPRIVGGQECKDGECPWQALLINEENEGFCGGTILSEFYILTAAHCLYQAKRFKVRVGDRNTEQEEGGEAVHEVEVVIKHNRFTKETYDFDIAVLRLKTPITFRMNVAPACLPERDWAESTLMTQKTGIVSGFGRTHEKGRQSTRLKMLEVPYVDRNSCKLSSSFIITQNMFCAGYDTKQEDACQGDSGGPHVTRFKDTYFVTGIVSWGEGCARKGKYGIYTKVTAFLKWIDRSMKTRGLPKAKSHAPEVITSSPLKDQVDPRLIDGK

SEQ ID NO: 31 - DNA, 1353 bp, Artificial
  Recombinant
gccaattcctttcttgaagagatgaagaaaggacacctcgaaagagagtgcatggaagagacctgctcatacgaagaggcccgcgaggtctttgaggacagcgacaagacgaatgaattctggaataaatacaaagatggcgaccagtgtgagaccagtccttgccagaaccagggcaaatgtaaagacggcctcggggaatacacctgcacctgtttagaaggattcgaaggcaaaaactgtgaattattcacacggaagctctgcagcctggacaacggggactgtgaccagttctgccacgaggaacagaactctgtggtgtgctcctgcgcccgcgggtacaccctggctgacaacggcaaggcctgcattcccacagggccctacccctgtgggaaacagaccctggaacgcaggaagaggtcagtggcccaggccaccagcagcagcggggaggcccctgacagcatcacatggaagccatatgatgcagccgacctggaccccaccgagaaccccttcgacctgcttgacttcaaccagacgcagcctgagaggggcgacaacaacgccaccatgacccccaggatcgtgggaggccaggaatgcaaggacggggagtgtccctggcaggccctgctcatcaatgaggaaaacgagggtttctgtggtggaactattctgagcgagttctacatcctaacggcagcccactgtctctaccaagccaagagattcaaggtgagggtaggggaccggaacacggagcaggaggagggcggtgaggcggtgcacgaggtggaggtggtcatcaagcacaaccggttcacaaaggagacctatgacttcgacatcgccgtgctccggctcaagacccccatcaccttccgcatgaacgtggcgcctgcctgcctccccgagcgtgactgggccgagtccacgctgatgacgcagaagacggggattgtgagtggcttcgggcgcacccacgagaagggccggcagtccaccaggctcaagatgctggaggtgccctacgtggaccgcaacagctgcaagctgtccagcagcttcatcatcacccagaacatgttctgtgccggctacgacaccaagcaggaggatgcctgccagggggacagcgggggcccgcacgtcacccgcttcaaggacacctacttcgtgacaggcatcgtcagctggggagagggctgtgcccgtaaggggaagtacgggatctacaccaaggtcaccgccttcctcaagtggatcgacaggtccatgaaaaccaggggcttgcccaaggccaagagccatgccccggaggtcataacgtcctctccattaaaa

SEQ ID NO: 32 - protein, 451 aa, Artificial
  Recombinant
ANSFLEEMKKGHLERECMEETCSYEEAREVFEDSDKTNEFWNKYKDGDQCETSPCQNQGKCKDGLGEYTCTCLEGFEGKNCELFTRKLCSLDNGDCDQFCHEEQNSVVCSCARGYTLADNGKACIPTGPYPCGKQTLERRKRSVAQATSSSGEAPDSITWKPYDAADLDPTENPFDLLDFNQTQPERGDNNATMTPRIVGGQECKDGECPWQALLINEENEGFCGGTILSEFYILTAAHCLYQAKRFKVRVGDRNTEQEEGGEAVHEVEVVIKHNRFTKETYDFDIAVLRLKTPITFRMNVAPACLPERDWAESTLMTQKTGIVSGFGRTHEKGRQSTRLKMLEVPYVDRNSCKLSSSFIITQNMFCAGYDTKQEDACQGDSGGPHVTRFKDTYFVTGIVSWGEGCARKGKYGIYTKVTAFLKWIDRSMKTRGLPKAKSHAPEVITSSPLK

SEQ ID NO: 33 - DNA, 1386 bp, Artificial
  Recombinant
gccaattcctttcttgaagagatgaagaaaggacacctcgaaagagagtgcatggaagagacctgctcatacgaagaggcccgcgaggtctttgaggacagcgacaagacgaatgaattctggaataaatacaaagatggcgaccagtgtgagaccagtccttgccagaaccagggcaaatgtaaagacggcctcggggaatacacctgcacctgtttagaaggattcgaaggcaaaaactgtgaattattcacacggaagctctgcagcctggacaacggggactgtgaccagttctgccacgaggaacagaactctgtggtgtgctcctgcgcccgcgggtacaccctggctgacaacggcaaggcctgcattcccacagggccctacccctgtgggaaacagaccctggaacgcaggaagaggtcagtggcccaggccaccagcagcagcggggaggcccctgacagcatcacatggaagccatatgatgcagccgacctggaccccaccgagaaccccttcgacctgcttgacttcaaccagacgcagcctgagaggggcgacaacaacgccaccatccagcccaggatcgtgggaggccaggaatgcaaggacggggagtgtccctggcaggccctgctcatcaatgaggaaaacgagggtttctgtggtggaactattctgagcgagttctacatcctaacggcagcccactgtctctaccaagccaagagattcaaggtgagggtaggggaccggaacacggagcaggaggagggcggtgaggcggtgcacgaggtggaggtggtcatcaagcacaaccggttcacaaaggagacctatgacttcgacatcgccgtgctccggctcaagacccccatcaccttccgcatgaacgtggcgcctgcctgcctccccgagcgtgactgggccgagtccacgctgatgacgcagaagacggggattgtgagtggcttcgggcgcacccacgagaagggccggcagtccaccaggctcaagatgctggaggtgccctacgtggaccgcaacagctgcaagctgtccagcagcttcatcatcacccagaacatgttctgtgccggctacgacaccaagcaggaggatgcctgccagggggacagcgggggcccgcacgtcacccgcttcaaggacacctacttcgtgacaggcatcgtcagctggggagagggctgtgcccgtaaggggaagtacgggatctacaccaaggtcaccgccttcctcaagtggatcgacaggtccatgaaaaccaggggcttgcccaaggccaagagccatgccccggaggtcataacgtcctctccattaaaagaccaagtagatccgcggctcattgatgggaag

SEQ ID NO: 34 - protein, 462 aa, Artificial
  Recombinant
ANSFLEEMKKGHLERECMEETCSYEEAREVFEDSDKTNEFWNKYKDGDQCETSPCQNQGKCKDGLGEYTCTCLEGFEGKNCELFTRKLCSLDNGDCDQFCHEEQNSVVCSCARGYTLADNGKACIPTGPYPCGKQTLERRKRSVAQATSSSGEAPDSITWKPYDAADLDPTENPFDLLDFNQTQPERGDNNATIQPRIVGGQECKDGECPWQALLINEENEGFCGGTILSEFYILTAAHCLYQAKRFKVRVGDRNTEQEEGGEAVHEVEVVIKHNRFTKETYDFDIAVLRLKTPITFRMNVAPACLPERDWAESTLMTQKTGIVSGFGRTHEKGRQSTRLKMLEVPYVDRNSCKLSSSFIITQNMFCAGYDTKQEDACQGDSGGPHVTRFKDTYFVTGIVSWGEGCARKGKYGIYTKVTAFLKWIDRSMKTRGLPKAKSHAPEVITSSPLKDQVDPRLIDGK

SEQ ID NO: 35 - DNA, 1353 bp, Artificial
  Recombinant
gccaattcctttcttgaagagatgaagaaaggacacctcgaaagagagtgcatggaagagacctgctcatacgaagaggcccgcgaggtctttgaggacagcgacaagacgaatgaattctggaataaatacaaagatggcgaccagtgtgagaccagtccttgccagaaccagggcaaatgtaaagacggcctcggggaatacacctgcacctgtttagaaggattcgaaggcaaaaactgtgaattattcacacggaagctctgcagcctggacaacggggactgtgaccagttctgccacgaggaacagaactctgtggtgtgctcctgcgcccgcgggtacaccctggctgacaacggcaaggcctgcattcccacagggccctacccctgtgggaaacagaccctggaacgcaggaagaggtcagtggcccaggccaccagcagcagcggggaggcccctgacagcatcacatggaagccatatgatgcagccgacctggaccccaccgagaaccccttcgacctgcttgacttcaaccagacgcagcctgagaggggcgacaacaacgccaccatccagcccaggatcgtgggaggccaggaatgcaaggacggggagtgtccctggcaggccctgctcatcaatgaggaaaacgagggtttctgtggtggaactattctgagcgagttctacatcctaacggcagcccactgtctctaccaagccaagagattcaaggtgagggtaggggaccggaacacggagcaggaggagggcggtgaggcggtgcacgaggtggaggtggtcatcaagcacaaccggttcacaaaggagacctatgacttcgacatcgccgtgctccggctcaagacccccatcaccttccgcatgaacgtggcgcctgcctgcctccccgagcgtgactgggccgagtccacgctgatgacgcagaagacggggattgtgagtggcttcgggcgcacccacgagaagggccggcagtccaccaggctcaagatgctggaggtgccctacgtggaccgcaacagctgcaagctgtccagcagcttcatcatcacccagaacatgttctgtgccggctacgacaccaagcaggaggatgcctgccagggggacagcgggggcccgcacgtcacccgcttcaaggacacctacttcgtgacaggcatcgtcagctggggagagggctgtgcccgtaaggggaagtacgggatctacaccaaggtcaccgccttcctcaagtggatcgacaggtccatgaaaaccaggggcttgcccaaggccaagagccatgccccggaggtcataacgtcctctccattaaaa

SEQ ID NO: 36 - protein, 451 aa, Artificial
  Recombinant
ANSFLEEMKKGHLERECMEETCSYEEAREVFEDSDKTNEFWNKYKDGDQCETSPCQNQGKCKDGLGEYTCTCLEGFEGKNCELFTRKLCSLDNGDCDQFCHEEQNSVVCSCARGYTLADNGKACIPTGPYPCGKQTLERRKRSVAQATSSSGEAPDSITWKPYDAADLDPTENPFDLLDFNQTQPERGDNNATIQPRIVGGQECKDGECPWQALLINEENEGFCGGTILSEFYILTAAHCLYQAKRFKVRVGDRNTEQEEGGEAVHEVEVVIKHNRFTKETYDFDIAVLRLKTPITFRMNVAPACLPERDWAESTLMTQKTGIVSGFGRTHEKGRQSTRLKMLEVPYVDRNSCKLSSSFIITQNMFCAGYDTKQEDACQGDSGGPHVTRFKDTYFVTGIVSWGEGCARKGKYGIYTKVTAFLKWIDRSMKTRGLPKAKSHAPEVITSSPLK

SEQ ID NO: 37 - DNA, 1386 bp, Artificial
  Recombinant
gccaattcctttcttgaagagatgaagaaaggacacctcgaaagagagtgcatggaagagacctgctcatacgaagaggcccgcgaggtctttgaggacagcgacaagacgaatgaattctggaataaatacaaagatggcgaccagtgtgagaccagtccttgccagaaccagggcaaatgtaaagacggcctcggggaatacacctgcacctgtttagaaggattcgaaggcaaaaactgtgaattattcacacggaagctctgcagcctggacaacggggactgtgaccagttctgccacgaggaacagaactctgtggtgtgctcctgcgcccgcgggtacaccctggctgacaacggcaaggcctgcattcccacagggccctacccctgtgggaaacagaccctggaacgcaggaagaggtcagtggcccaggccaccagcagcagcggggaggcccctgacagcatcacatggaagccatatgatgcagccgacctggaccccaccgagaaccccttcgacctgcttgacttcaaccagacgcagcctgagaggggcgacaacaacgccaccatcatgcccaggatcgtgggaggccaggaatgcaaggacggggagtgtccctggcaggccctgctcatcaatgaggaaaacgagggtttctgtggtggaactattctgagcgagttctacatcctaacggcagcccactgtctctaccaagccaagagattcaaggtgagggtaggggaccggaacacggagcaggaggagggcggtgaggcggtgcacgaggtggaggtggtcatcaagcacaaccggttcacaaaggagacctatgacttcgacatcgccgtgctccggctcaagacccccatcaccttccgcatgaacgtggcgcctgcctgcctccccgagcgtgactgggccgagtccacgctgatgacgcagaagacggggattgtgagtggcttcgggcgcacccacgagaagggccggcagtccaccaggctcaagatgctggaggtgccctacgtggaccgcaacagctgcaagctgtccagcagcttcatcatcacccagaacatgttctgtgccggctacgacaccaagcaggaggatgcctgccagggggacagcgggggcccgcacgtcacccgcttcaaggacacctacttcgtgacaggcatcgtcagctggggagagggctgtgcccgtaaggggaagtacgggatctacaccaaggtcaccgccttcctcaagtggatcgacaggtccatgaaaaccaggggcttgcccaaggccaagagccatgccccggaggtcataacgtcctctccattaaaagaccaagtagatccgcggctcattgatgggaag

SEQ ID NO: 38 - protein, 462 aa, Artificial
  Recombinant
ANSFLEEMKKGHLERECMEETCSYEEAREVFEDSDKTNEFWNKYKDGDQCETSPCQNQGKCKDGLGEYTCTCLEGFEGKNCELFTRKLCSLDNGDCDQFCHEEQNSVVCSCARGYTLADNGKACIPTGPYPCGKQTLERRKRSVAQATSSSGEAPDSITWKPYDAADLDPTENPFDLLDFNQTQPERGDNNATIMPRIVGGQECKDGECPWQALLINEENEGFCGGTILSEFYILTAAHCLYQAKRFKVRVGDRNTEQEEGGEAVHEVEVVIKHNRFTKETYDFDIAVLRLKTPITFRMNVAPACLPERDWAESTLMTQKTGIVSGFGRTHEKGRQSTRLKMLEVPYVDRNSCKLSSSFIITQNMFCAGYDTKQEDACQGDSGGPHVTRFKDTYFVTGIVSWGEGCARKGKYGIYTKVTAFLKWIDRSMKTRGLPKAKSHAPEVITSSPLKDQVDPRLIDGK

SEQ ID NO: 39 - DNA, 1353 bp, Artificial
  Recombinant
gccaattcctttcttgaagagatgaagaaaggacacctcgaaagagagtgcatggaagagacctgctcatacgaagaggcccgcgaggtctttgaggacagcgacaagacgaatgaattctggaataaatacaaagatggcgaccagtgtgagaccagtccttgccagaaccagggcaaatgtaaagacggcctcggggaatacacctgcacctgtttagaaggattcgaaggcaaaaactgtgaattattcacacggaagctctgcagcctggacaacggggactgtgaccagttctgccacgaggaacagaactctgtggtgtgctcctgcgcccgcgggtacaccctggctgacaacggcaaggcctgcattcccacagggccctacccctgtgggaaacagaccctggaacgcaggaagaggtcagtggcccaggccaccagcagcagcggggaggcccctgacagcatcacatggaagccatatgatgcagccgacctggaccccaccgagaaccccttcgacctgcttgacttcaaccagacgcagcctgagaggggcgacaacaacgccaccatcatgcccaggatcgtgggaggccaggaatgcaaggacggggagtgtccctggcaggccctgctcatcaatgaggaaaacgagggtttctgtggtggaactattctgagcgagttctacatcctaacggcagcccactgtctctaccaagccaagagattcaaggtgagggtaggggaccggaacacggagcaggaggagggcggtgaggcggtgcacgaggtggaggtggtcatcaagcacaaccggttcacaaaggagacctatgacttcgacatcgccgtgctccggctcaagacccccatcaccttccgcatgaacgtggcgcctgcctgcctccccgagcgtgactgggccgagtccacgctgatgacgcagaagacggggattgtgagtggcttcgggcgcacccacgagaagggccggcagtccaccaggctcaagatgctggaggtgccctacgtggaccgcaacagctgcaagctgtccagcagcttcatcatcacccagaacatgttctgtgccggctacgacaccaagcaggaggatgcctgccagggggacagcgggggcccgcacgtcacccgcttcaaggacacctacttcgtgacaggcatcgtcagctggggagagggctgtgcccgtaaggggaagtacgggatctacaccaaggtcaccgccttcctcaagtggatcgacaggtccatgaaaaccaggggcttgcccaaggccaagagccatgccccggaggtcataacgtcctctccattaaaa

SEQ ID NO: 40 - protein, 451 aa, Artificial
  Recombinant
ANSFLEEMKKGHLERECMEETCSYEEAREVFEDSDKTNEFWNKYKDGDQCETSPCQNQGKCKDGLGEYTCTCLEGFEGKNCELFTRKLCSLDNGDCDQFCHEEQNSVVCSCARGYTLADNGKACIPTGPYPCGKQTLERRKRSVAQATSSSGEAPDSITWKPYDAADLDPTENPFDLLDFNQTQPERGDNNATIMPRIVGGQECKDGECPWQALLINEENEGFCGGTILSEFYILTAAHCLYQAKRFKVRVGDRNTEQEEGGEAVHEVEVVIKHNRFTKETYDFDIAVLRLKTPITFRMNVAPACLPERDWAESTLMTQKTGIVSGFGRTHEKGRQSTRLKMLEVPYVDRNSCKLSSSFIITQNMFCAGYDTKQEDACQGDSGGPHVTRFKDTYFVTGIVSWGEGCARKGKYGIYTKVTAFLKWIDRSMKTRGLPKAKSHAPEVITSSPLK

SEQ ID NO: 41 - DNA, 1386 bp, Artificial
  Recombinant
gccaattcctttcttgaagagatgaagaaaggacacctcgaaagagagtgcatggaagagacctgctcatacgaagaggcccgcgaggtctttgaggacagcgacaagacgaatgaattctggaataaatacaaagatggcgaccagtgtgagaccagtccttgccagaaccagggcaaatgtaaagacggcctcggggaatacacctgcacctgtttagaaggattcgaaggcaaaaactgtgaattattcacacggaagctctgcagcctggacaacggggactgtgaccagttctgccacgaggaacagaactctgtggtgtgctcctgcgcccgcgggtacaccctggctgacaacggcaaggcctgcattcccacagggccctacccctgtgggaaacagaccctggaacgcaggaagaggtcagtggcccaggccaccagcagcagcggggaggcccctgacagcatcacatggaagccatatgatgcagccgacctggaccccaccgagaaccccttcgacctgcttgacttcaaccagacgcagcctgagaggggcgacaacaacgccaccatcaggcccaggatcgtgggaggccaggaatgcaaggacggggagtgtccctggcaggccctgctcatcaatgaggaaaacgagggtttctgtggtggaactattctgagcgagttctacatcctaacggcagcccactgtctctaccaagccaagagattcaaggtgagggtaggggaccggaacacggagcaggaggagggcggtgaggcggtgcacgaggtggaggtggtcatcaagcacaaccggttcacaaaggagacctatgacttcgacatcgccgtgctccggctcaagacccccatcaccttccgcatgaacgtggcgcctgcctgcctccccgagcgtgactgggccgagtccacgctgatgacgcagaagacggggattgtgagtggcttcgggcgcacccacgagaagggccggcagtccaccaggctcaagatgctggaggtgccctacgtggaccgcaacagctgcaagctgtccagcagcttcatcatcacccagaacatgttctgtgccggctacgacaccaagcaggaggatgcctgccagggggacagcgggggcccgcacgtcacccgcttcaaggacacctacttcgtgacaggcatcgtcagctggggagagggctgtgcccgtaaggggaagtacgggatctacaccaaggtcaccgccttcctcaagtggatcgacaggtccatgaaaaccaggggcttgcccaaggccaagagccatgccccggaggtcataacgtcctctccattaaaagaccaagtagatccgcggctcattgatgggaag

SEQ ID NO: 42 - protein, 462 aa, Artificial
  Recombinant
ANSFLEEMKKGHLERECMEETCSYEEAREVFEDSDKTNEFWNKYKDGDQCETSPCQNQGKCKDGLGEYTCTCLEGFEGKNCELFTRKLCSLDNGDCDQFCHEEQNSVVCSCARGYTLADNGKACIPTGPYPCGKQTLERRKRSVAQATSSSGEAPDSITWKPYDAADLDPTENPFDLLDFNQTQPERGDNNATIRPRIVGGQECKDGECPWQALLINEENEGFCGGTILSEFYILTAAHCLYQAKRFKVRVGDRNTEQEEGGEAVHEVEVVIKHNRFTKETYDFDIAVLRLKTPITFRMNVAPACLPERDWAESTLMTQKTGIVSGFGRTHEKGRQSTRLKMLEVPYVDRNSCKLSSSFIITQNMFCAGYDTKQEDACQGDSGGPHVTRFKDTYFVTGIVSWGEGCARKGKYGIYTKVTAFLKWIDRSMKTRGLPKAKSHAPEVITSSPLKDQVDPRLIDGK

SEQ ID NO: 43 - DNA, 1353 bp, Artificial
  Recombinant
gccaattcctttcttgaagagatgaagaaaggacacctcgaaagagagtgcatggaagagacctgctcatacgaagaggcccgcgaggtctttgaggacagcgacaagacgaatgaattctggaataaatacaaagatggcgaccagtgtgagaccagtccttgccagaaccagggcaaatgtaaagacggcctcggggaatacacctgcacctgtttagaaggattcgaaggcaaaaactgtgaattattcacacggaagctctgcagcctggacaacggggactgtgaccagttctgccacgaggaacagaactctgtggtgtgctcctgcgcccgcgggtacaccctggctgacaacggcaaggcctgcattcccacagggccctacccctgtgggaaacagaccctggaacgcaggaagaggtcagtggcccaggccaccagcagcagcggggaggcccctgacagcatcacatggaagccatatgatgcagccgacctggaccccaccgagaaccccttcgacctgcttgacttcaaccagacgcagcctgagaggggcgacaacaacgccaccatcaggcccaggatcgtgggaggccaggaatgcaaggacggggagtgtccctggcaggccctgctcatcaatgaggaaaacgagggtttctgtggtggaactattctgagcgagttctacatcctaacggcagcccactgtctctaccaagccaagagattcaaggtgagggtaggggaccggaacacggagcaggaggagggcggtgaggcggtgcacgaggtggaggtggtcatcaagcacaaccggttcacaaaggagacctatgacttcgacatcgccgtgctccggctcaagacccccatcaccttccgcatgaacgtggcgcctgcctgcctccccgagcgtgactgggccgagtccacgctgatgacgcagaagacggggattgtgagtggcttcgggcgcacccacgagaagggccggcagtccaccaggctcaagatgctggaggtgccctacgtggaccgcaacagctgcaagctgtccagcagcttcatcatcacccagaacatgttctgtgccggctacgacaccaagcaggaggatgcctgccagggggacagcgggggcccgcacgtcacccgcttcaaggacacctacttcgtgacaggcatcgtcagctggggagagggctgtgcccgtaaggggaagtacgggatctacaccaaggtcaccgccttcctcaagtggatcgacaggtccatgaaaaccaggggcttgcccaaggccaagagccatgccccggaggtcataacgtcctctccattaaaa

SEQ ID NO: 44 - protein, 451 aa, Artificial
  Recombinant
ANSFLEEMKKGHLERECMEETCSYEEAREVFEDSDKTNEFWNKYKDGDQCETSPCQNQGKCKDGLGEYTCTCLEGFEGKNCELFTRKLCSLDNGDCDQFCHEEQNSVVCSCARGYTLADNGKACIPTGPYPCGKQTLERRKRSVAQATSSSGEAPDSITWKPYDAADLDPTENPFDLLDFNQTQPERGDNNATIRPRIVGGQECKDGECPWQALLINEENEGFCGGTILSEFYILTAAHCLYQAKRFKVRVGDRNTEQEEGGEAVHEVEVVIKHNRFTKETYDFDIAVLRLKTPITFRMNVAPACLPERDWAESTLMTQKTGIVSGFGRTHEKGRQSTRLKMLEVPYVDRNSCKLSSSFIITQNMFCAGYDTKQEDACQGDSGGPHVTRFKDTYFVTGIVSWGEGCARKGKYGIYTKVTAFLKWIDRSMKTRGLPKAKSHAPEVITSSPLK

SEQ ID NO: 45 - DNA, 1386 bp, Artificial
  Recombinant
gccaattcctttcttgaagagatgaagaaaggacacctcgaaagagagtgcatggaagagacctgctcatacgaagaggcccgcgaggtctttgaggacagcgacaagacgaatgaattctggaataaatacaaagatggcgaccagtgtgagaccagtccttgccagaaccagggcaaatgtaaagacggcctcggggaatacacctgcacctgtttagaaggattcgaaggcaaaaactgtgaattattcacacggaagctctgcagcctggacaacggggactgtgaccagttctgccacgaggaacagaactctgtggtgtgctcctgcgcccgcgggtacaccctggctgacaacggcaaggcctgcattcccacagggccctacccctgtgggaaacagaccctggaacgcaggaagaggtcagtggcccaggccaccagcagcagcggggaggcccctgacagcatcacatggaagccatatgatgcagccgacctggaccccaccgagaaccccttcgacctgcttgacttcaaccagacgcagcctgagaggggcgacaacaacgccaccatcacccccaggatcgtgggaggccaggaatgcaaggacggggagtgtccctggcaggccctgctcatcaatgaggaaaacgagggtttctgtggtggaactattctgagcgagttctacatcctaacggcagcccactgtctctaccaagccaagagattcaaggtgagggtaggggaccggaacacggagcaggaggagggcggtgaggcggtgcacgaggtggaggtggtcatcaagcacaaccggttcacaaaggagacctatgacttcgacatcgccgtgctccggctcaagacccccatcaccttccgcatgaacgtggcgcctgcctgcctccccgagcgtgactgggccgagtccacgctgatgacgcagaagacggggattgtgagtggcttcgggcgcacccacgagaagggccggcagtccaccaggctcaagatgctggaggtgccctacgtggaccgcaacagctgcaagctgtccagcagcttcatcatcacccagaacatgttctgtgccggctacgacaccaagcaggaggatgcctgccagggggacagcgggggcccgcacgtcacccgcttcaaggacacctacttcgtgacaggcatcgtcagctggggagagggctgtgcccgtaaggggaagtacgggatctacaccaaggtcaccgccttcctcaagtggatcgacaggtccatgaaaaccaggggcttgcccaaggccaagagccatgccccggaggtcataacgtcctctccattaaaagaccaagtagatccgcggctcattgatgggaag

SEQ ID NO: 46 - protein, 462 aa, Artificial
  Recombinant
ANSFLEEMKKGHLERECMEETCSYEEAREVFEDSDKTNEFWNKYKDGDQCETSPCQNQGKCKDGLGEYTCTCLEGFEGKNCELFTRKLCSLDNGDCDQFCHEEQNSVVCSCARGYTLADNGKACIPTGPYPCGKQTLERRKRSVAQATSSSGEAPDSITWKPYDAADLDPTENPFDLLDFNQTQPERGDNNATITPRIVGGQECKDGECPWQALLINEENEGFCGGTILSEFYILTAAHCLYQAKRFKVRVGDRNTEQEEGGEAVHEVEVVIKHNRFTKETYDFDIAVLRLKTPITFRMNVAPACLPERDWAESTLMTQKTGIVSGFGRTHEKGRQSTRLKMLEVPYVDRNSCKLSSSFIITQNMFCAGYDTKQEDACQGDSGGPHVTRFKDTYFVTGIVSWGEGCARKGKYGIYTKVTAFLKWIDRSMKTRGLPKAKSHAPEVITSSPLKDQVDPRLIDGK

SEQ ID NO: 47 - DNA, 1353 bp, Artificial
  Recombinant
gccaattcctttcttgaagagatgaagaaaggacacctcgaaagagagtgcatggaagagacctgctcatacgaagaggcccgcgaggtctttgaggacagcgacaagacgaatgaattctggaataaatacaaagatggcgaccagtgtgagaccagtccttgccagaaccagggcaaatgtaaagacggcctcggggaatacacctgcacctgtttagaaggattcgaaggcaaaaactgtgaattattcacacggaagctctgcagcctggacaacggggactgtgaccagttctgccacgaggaacagaactctgtggtgtgctcctgcgcccgcgggtacaccctggctgacaacggcaaggcctgcattcccacagggccctacccctgtgggaaacagaccctggaacgcaggaagaggtcagtggcccaggccaccagcagcagcggggaggcccctgacagcatcacatggaagccatatgatgcagccgacctggaccccaccgagaaccccttcgacctgcttgacttcaaccagacgcagcctgagaggggcgacaacaacgccaccatcacccccaggatcgtgggaggccaggaatgcaaggacggggagtgtccctggcaggccctgctcatcaatgaggaaaacgagggtttctgtggtggaactattctgagcgagttctacatcctaacggcagcccactgtctctaccaagccaagagattcaaggtgagggtaggggaccggaacacggagcaggaggagggcggtgaggcggtgcacgaggtggaggtggtcatcaagcacaaccggttcacaaaggagacctatgacttcgacatcgccgtgctccggctcaagacccccatcaccttccgcatgaacgtggcgcctgcctgcctccccgagcgtgactgggccgagtccacgctgatgacgcagaagacggggattgtgagtggcttcgggcgcacccacgagaagggccggcagtccaccaggctcaagatgctggaggtgccctacgtggaccgcaacagctgcaagctgtccagcagcttcatcatcacccagaacatgttctgtgccggctacgacaccaagcaggaggatgcctgccagggggacagcgggggcccgcacgtcacccgcttcaaggacacctacttcgtgacaggcatcgtcagctggggagagggctgtgcccgtaaggggaagtacgggatctacaccaaggtcaccgccttcctcaagtggatcgacaggtccatgaaaaccaggggcttgcccaaggccaagagccatgccccggaggtcataacgtcctctccattaaaa

SEQ ID NO: 48 - protein, 451 aa, Artificial
  Recombinant
ANSFLEEMKKGHLERECMEETCSYEEAREVFEDSDKTNEFWNKYKDGDQCETSPCQNQGKCKDGLGEYTCTCLEGFEGKNCELFTRKLCSLDNGDCDQFCHEEQNSVVCSCARGYTLADNGKACIPTGPYPCGKQTLERRKRSVAQATSSSGEAPDSITWKPYDAADLDPTENPFDLLDFNQTQPERGDNNATITPRIVGGQECKDGECPWQALLINEENEGFCGGTILSEFYILTAAHCLYQAKRFKVRVGDRNTEQEEGGEAVHEVEVVIKHNRFTKETYDFDIAVLRLKTPITFRMNVAPACLPERDWAESTLMTQKTGIVSGFGRTHEKGRQSTRLKMLEVPYVDRNSCKLSSSFIITQNMFCAGYDTKQEDACQGDSGGPHVTRFKDTYFVTGIVSWGEGCARKGKYGIYTKVTAFLKWIDRSMKTRGLPKAKSHAPEVITSSPLK

SEQ ID NO: 49 - DNA, 1386 bp, Artificial
  Recombinant
gccaattcctttcttgaagagatgaagaaaggacacctcgaaagagagtgcatggaagagacctgctcatacgaagaggcccgcgaggtctttgaggacagcgacaagacgaatgaattctggaataaatacaaagatggcgaccagtgtgagaccagtccttgccagaaccagggcaaatgtaaagacggcctcggggaatacacctgcacctgtttagaaggattcgaaggcaaaaactgtgaattattcacacggaagctctgcagcctggacaacggggactgtgaccagttctgccacgaggaacagaactctgtggtgtgctcctgcgcccgcgggtacaccctggctgacaacggcaaggcctgcattcccacagggccctacccctgtgggaaacagaccctggaacgcaggaagaggtcagtggcccaggccaccagcagcagcggggaggcccctgacagcatcacatggaagccatatgatgcagccgacctggaccccaccgagaaccccttcgacctgcttgacttcaaccagacgcagcctgagaggggcgacaacaacgccaccttcaggcccaggatcgtgggaggccaggaatgcaaggacggggagtgtccctggcaggccctgctcatcaatgaggaaaacgagggtttctgtggtggaactattctgagcgagttctacatcctaacggcagcccactgtctctaccaagccaagagattcaaggtgagggtaggggaccggaacacggagcaggaggagggcggtgaggcggtgcacgaggtggaggtggtcatcaagcacaaccggttcacaaaggagacctatgacttcgacatcgccgtgctccggctcaagacccccatcaccttccgcatgaacgtggcgcctgcctgcctccccgagcgtgactgggccgagtccacgctgatgacgcagaagacggggattgtgagtggcttcgggcgcacccacgagaagggccggcagtccaccaggctcaagatgctggaggtgccctacgtggaccgcaacagctgcaagctgtccagcagcttcatcatcacccagaacatgttctgtgccggctacgacaccaagcaggaggatgcctgccagggggacagcgggggcccgcacgtcacccgcttcaaggacacctacttcgtgacaggcatcgtcagctggggagagggctgtgcccgtaaggggaagtacgggatctacaccaaggtcaccgccttcctcaagtggatcgacaggtccatgaaaaccaggggcttgcccaaggccaagagccatgccccggaggtcataacgtcctctccattaaaagaccaagtagatccgcggctcattgatgggaag

SEQ ID NO: 50 - protein, 462 aa, Artificial
  Recombinant
ANSFLEEMKKGHLERECMEETCSYEEAREVFEDSDKTNEFWNKYKDGDQCETSPCQNQGKCKDGLGEYTCTCLEGFEGKNCELFTRKLCSLDNGDCDQFCHEEQNSVVCSCARGYTLADNGKACIPTGPYPCGKQTLERRKRSVAQATSSSGEAPDSITWKPYDAADLDPTENPFDLLDFNQTQPERGDNNATFRPRIVGGQECKDGECPWQALLINEENEGFCGGTILSEFYILTAAHCLYQAKRFKVRVGDRNTEQEEGGEAVHEVEVVIKHNRFTKETYDFDIAVLRLKTPITFRMNVAPACLPERDWAESTLMTQKTGIVSGFGRTHEKGRQSTRLKMLEVPYVDRNSCKLSSSFIITQNMFCAGYDTKQEDACQGDSGGPHVTRFKDTYFVTGIVSWGEGCARKGKYGIYTKVTAFLKWIDRSMKTRGLPKAKSHAPEVITSSPLKDQVDPRLIDGK

SEQ ID NO: 51 - DNA, 1353 bp, Artificial
  Recombinant
gccaattcctttcttgaagagatgaagaaaggacacctcgaaagagagtgcatggaagagacctgctcatacgaagaggcccgcgaggtctttgaggacagcgacaagacgaatgaattctggaataaatacaaagatggcgaccagtgtgagaccagtccttgccagaaccagggcaaatgtaaagacggcctcggggaatacacctgcacctgtttagaaggattcgaaggcaaaaactgtgaattattcacacggaagctctgcagcctggacaacggggactgtgaccagttctgccacgaggaacagaactctgtggtgtgctcctgcgcccgcgggtacaccctggctgacaacggcaaggcctgcattcccacagggccctacccctgtgggaaacagaccctggaacgcaggaagaggtcagtggcccaggccaccagcagcagcggggaggcccctgacagcatcacatggaagccatatgatgcagccgacctggaccccaccgagaaccccttcgacctgcttgacttcaaccagacgcagcctgagaggggcgacaacaacgccaccttcaggcccaggatcgtgggaggccaggaatgcaaggacggggagtgtccctggcaggccctgctcatcaatgaggaaaacgagggtttctgtggtggaactattctgagcgagttctacatcctaacggcagcccactgtctctaccaagccaagagattcaaggtgagggtaggggaccggaacacggagcaggaggagggcggtgaggcggtgcacgaggtggaggtggtcatcaagcacaaccggttcacaaaggagacctatgacttcgacatcgccgtgctccggctcaagacccccatcaccttccgcatgaacgtggcgcctgcctgcctccccgagcgtgactgggccgagtccacgctgatgacgcagaagacggggattgtgagtggcttcgggcgcacccacgagaagggccggcagtccaccaggctcaagatgctggaggtgccctacgtggaccgcaacagctgcaagctgtccagcagcttcatcatcacccagaacatgttctgtgccggctacgacaccaagcaggaggatgcctgccagggggacagcgggggcccgcacgtcacccgcttcaaggacacctacttcgtgacaggcatcgtcagctggggagagggctgtgcccgtaaggggaagtacgggatctacaccaaggtcaccgccttcctcaagtggatcgacaggtccatgaaaaccaggggcttgcccaaggccaagagccatgccccggaggtcataacgtcctctccattaaaa

SEQ ID NO: 52 - protein, 462 aa, Artificial; identical to SEQ ID NO: 50
  Recombiant

SEQ ID NO: 53 - DNA, 1386 bp, Artificial
  Recombinant
gccaattcctttcttgaagagatgaagaaaggacacctcgaaagagagtgcatggaagagacctgctcatacgaagaggcccgcgaggtctttgaggacagcgacaagacgaatgaattctggaataaatacaaagatggcgaccagtgtgagaccagtccttgccagaaccagggcaaatgtaaagacggcctcggggaatacacctgcacctgtttagaaggattcgaaggcaaaaactgtgaattattcacacggaagctctgcagcctggacaacggggactgtgaccagttctgccacgaggaacagaactctgtggtgtgctcctgcgcccgcgggtacaccctggctgacaacggcaaggcctgcattcccacagggccctacccctgtgggaaacagaccctggaacgcaggaagaggtcagtggcccaggccaccagcagcagcggggaggcccctgacagcatcacatggaagccatatgatgcagccgacctggaccccaccgagaaccccttcgacctgcttgacttcaaccagacgcagcctgagaggggcgacaacaacgccaccctgtcccccaggatcgtgggaggccaggaatgcaaggacggggagtgtccctggcaggccctgctcatcaatgaggaaaacgagggtttctgtggtggaactattctgagcgagttctacatcctaacggcagcccactgtctctaccaagccaagagattcaaggtgagggtaggggaccggaacacggagcaggaggagggcggtgaggcggtgcacgaggtggaggtggtcatcaagcacaaccggttcacaaaggagacctatgacttcgacatcgccgtgctccggctcaagacccccatcaccttccgcatgaacgtggcgcctgcctgcctccccgagcgtgactgggccgagtccacgctgatgacgcagaagacggggattgtgagtggcttcgggcgcacccacgagaagggccggcagtccaccaggctcaagatgctggaggtgccctacgtggaccgcaacagctgcaagctgtccagcagcttcatcatcacccagaacatgttctgtgccggctacgacaccaagcaggaggatgcctgccagggggacagcgggggcccgcacgtcacccgcttcaaggacacctacttcgtgacaggcatcgtcagctggggagagggctgtgcccgtaaggggaagtacgggatctacaccaaggtcaccgccttcctcaagtggatcgacaggtccatgaaaaccaggggcttgcccaaggccaagagccatgccccggaggtcataacgtcctctccattaaaagaccaagtagatccgcggctcattgatgggaag

SEQ ID NO: 54 - protein, 462 aa, Artificial
  Recombinant
ANSFLEEMKKGHLERECMEETCSYEEAREVFEDSDKTNEFWNKYKDGDQCETSPCQNQGKCKDGLGEYTCTCLEGFEGKNCELFTRKLCSLDNGDCDQFCHEEQNSVVCSCARGYTLADNGKACIPTGPYPCGKQTLERRKRSVAQATSSSGEAPDSITWKPYDAADLDPTENPFDLLDFNQTQPERGDNNATLSPRIVGGQECKDGECPWQALLINEENEGFCGGTILSEFYILTAAHCLYQAKRFKVRVGDRNTEQEEGGEAVHEVEVVIKHNRFTKETYDFDIAVLRLKTPITFRMNVAPACLPERDWAESTLMTQKTGIVSGFGRTHEKGRQSTRLKMLEVPYVDRNSCKLSSSFIITQNMFCAGYDTKQEDACQGDSGGPHVTRFKDTYFVTGIVSWGEGCARKGKYGIYTKVTAFLKWIDRSMKTRGLPKAKSHAPEVITSSPLKDQVDPRLIDGK

SEQ ID NO: 55 - DNA, 1353 bp, Artificial
  Recombinant
gccaattcctttcttgaagagatgaagaaaggacacctcgaaagagagtgcatggaagagacctgctcatacgaagaggcccgcgaggtctttgaggacagcgacaagacgaatgaattctggaataaatacaaagatggcgaccagtgtgagaccagtccttgccagaaccagggcaaatgtaaagacggcctcggggaatacacctgcacctgtttagaaggattcgaaggcaaaaactgtgaattattcacacggaagctctgcagcctggacaacggggactgtgaccagttctgccacgaggaacagaactctgtggtgtgctcctgcgcccgcgggtacaccctggctgacaacggcaaggcctgcattcccacagggccctacccctgtgggaaacagaccctggaacgcaggaagaggtcagtggcccaggccaccagcagcagcggggaggcccctgacagcatcacatggaagccatatgatgcagccgacctggaccccaccgagaaccccttcgacctgcttgacttcaaccagacgcagcctgagaggggcgacaacaacgccaccctgtcccccaggatcgtgggaggccaggaatgcaaggacggggagtgtccctggcaggccctgctcatcaatgaggaaaacgagggtttctgtggtggaactattctgagcgagttctacatcctaacggcagcccactgtctctaccaagccaagagattcaaggtgagggtaggggaccggaacacggagcaggaggagggcggtgaggcggtgcacgaggtggaggtggtcatcaagcacaaccggttcacaaaggagacctatgacttcgacatcgccgtgctccggctcaagacccccatcaccttccgcatgaacgtggcgcctgcctgcctccccgagcgtgactgggccgagtccacgctgatgacgcagaagacggggattgtgagtggcttcgggcgcacccacgagaagggccggcagtccaccaggctcaagatgctggaggtgccctacgtggaccgcaacagctgcaagctgtccagcagcttcatcatcacccagaacatgttctgtgccggctacgacaccaagcaggaggatgcctgccagggggacagcgggggcccgcacgtcacccgcttcaaggacacctacttcgtgacaggcatcgtcagctggggagagggctgtgcccgtaaggggaagtacgggatctacaccaaggtcaccgccttcctcaagtggatcgacaggtccatgaaaaccaggggcttgcccaaggccaagagccatgccccggaggtcataacgtcctctccattaaaa

SEQ ID NO: 56 - protein, 451 aa, Artificial
  Recombinant
ANSFLEEMKKGHLERECMEETCSYEEAREVFEDSDKTNEFWNKYKDGDQCETSPCQNQGKCKDGLGEYTCTCLEGFEGKNCELFTRKLCSLDNGDCDQFCHEEQNSVVCSCARGYTLADNGKACIPTGPYPCGKQTLERRKRSVAQATSSSGEAPDSITWKPYDAADLDPTENPFDLLDFNQTQPERGDNNATLSPRIVGGQECKDGECPWQALLINEENEGFCGGTILSEFYILTAAHCLYQAKRFKVRVGDRNTEQEEGGEAVHEVEVVIKHNRFTKETYDFDIAVLRLKTPITFRMNVAPACLPERDWAESTLMTQKTGIVSGFGRTHEKGRQSTRLKMLEVPYVDRNSCKLSSSFIITQNMFCAGYDTKQEDACQGDSGGPHVTRFKDTYFVTGIVSWGEGCARKGKYGIYTKVTAFLKWIDRSMKTRGLPKAKSHAPEVITSSPLK

SEQ ID NO: 57 - DNA, 1386 bp, Artificial
  Recombinint
gccaattcctttcttgaagagatgaagaaaggacacctcgaaagagagtgcatggaagagacctgctcatacgaagaggcccgcgaggtctttgaggacagcgacaagacgaatgaattctggaataaatacaaagatggcgaccagtgtgagaccagtccttgccagaaccagggcaaatgtaaagacggcctcggggaatacacctgcacctgtttagaaggattcgaaggcaaaaactgtgaattattcacacggaagctctgcagcctggacaacggggactgtgaccagttctgccacgaggaacagaactctgtggtgtgctcctgcgcccgcgggtacaccctggctgacaacggcaaggcctgcattcccacagggccctacccctgtgggaaacagaccctggaacgcaggaagaggtcagtggcccaggccaccagcagcagcggggaggcccctgacagcatcacatggaagccatatgatgcagccgacctggaccccaccgagaaccccttcgacctgcttgacttcaaccagacgcagcctgagaggggcgacaacaacgccaccctggaccccaggatcgtgggaggccaggaatgcaaggacggggagtgtccctggcaggccctgctcatcaatgaggaaaacgagggtttctgtggtggaactattctgagcgagttctacatcctaacggcagcccactgtctctaccaagccaagagattcaaggtgagggtaggggaccggaacacggagcaggaggagggcggtgaggcggtgcacgaggtggaggtggtcatcaagcacaaccggttcacaaaggagacctatgacttcgacatcgccgtgctccggctcaagacccccatcaccttccgcatgaacgtggcgcctgcctgcctccccgagcgtgactgggccgagtccacgctgatgacgcagaagacggggattgtgagtggcttcgggcgcacccacgagaagggccggcagtccaccaggctcaagatgctggaggtgccctacgtggaccgcaacagctgcaagctgtccagcagcttcatcatcacccagaacatgttctgtgccggctacgacaccaagcaggaggatgcctgccagggggacagcgggggcccgcacgtcacccgcttcaaggacacctacttcgtgacaggcatcgtcagctggggagagggctgtgcccgtaaggggaagtacgggatctacaccaaggtcaccgccttcctcaagtggatcgacaggtccatgaaaaccaggggcttgcccaaggccaagagccatgccccggaggtcataacgtcctctccattaaaagaccaagtagatccgcggctcattgatgggaag

SEQ ID NO: 58 - protein, 462 aa, Artificial
  Recombinant
ANSFLEEMKKGHLERECMEETCSYEEAREVFEDSDKTNEFWNKYKDGDQCETSPCQNQGKCKDGLGEYTCTCLEGFEGKNCELFTRKLCSLDNGDCDQFCHEEQNSVVCSCARGYTLADNGKACIPTGPYPCGKQTLERRKRSVAQATSSSGEAPDSITWKPYDAADLDPTENPFDLLDFNQTQPERGDNNATLDPRIVGGQECKDGECPWQALLINEENEGFCGGTILSEFYILTAAHCLYQAKRFKVRVGDRNTEQEEGGEAVHEVEVVIKHNRFTKETYDFDIAVLRLKTPITFRMNVAPACLPERDWAESTLMTQKTGIVSGFGRTHEKGRQSTRLKMLEVPYVDRNSCKLSSSFIITQNMFCAGYDTKQEDACQGDSGGPHVTRFKDTYFVTGIVSWGEGCARKGKYGIYTKVTAFLKWIDRSMKTRGLPKAKSHAPEVITSSPLKDQVDPRLIDGK

SEQ ID NO: 59 - DNA, 1353 bp, Artificial
  Recombinant
gccaattcctttcttgaagagatgaagaaaggacacctcgaaagagagtgcatggaagagacctgctcatacgaagaggcccgcgaggtctttgaggacagcgacaagacgaatgaattctggaataaatacaaagatggcgaccagtgtgagaccagtccttgccagaaccagggcaaatgtaaagacggcctcggggaatacacctgcacctgtttagaaggattcgaaggcaaaaactgtgaattattcacacggaagctctgcagcctggacaacggggactgtgaccagttctgccacgaggaacagaactctgtggtgtgctcctgcgcccgcgggtacaccctggctgacaacggcaaggcctgcattcccacagggccctacccctgtgggaaacagaccctggaacgcaggaagaggtcagtggcccaggccaccagcagcagcggggaggcccctgacagcatcacatggaagccatatgatgcagccgacctggaccccaccgagaaccccttcgacctgcttgacttcaaccagacgcagcctgagaggggcgacaacaacgccaccctggaccccaggatcgtgggaggccaggaatgcaaggacggggagtgtccctggcaggccctgctcatcaatgaggaaaacgagggtttctgtggtggaactattctgagcgagttctacatcctaacggcagcccactgtctctaccaagccaagagattcaaggtgagggtaggggaccggaacacggagcaggaggagggcggtgaggcggtgcacgaggtggaggtggtcatcaagcacaaccggttcacaaaggagacctatgacttcgacatcgccgtgctccggctcaagacccccatcaccttccgcatgaacgtggcgcctgcctgcctccccgagcgtgactgggccgagtccacgctgatgacgcagaagacggggattgtgagtggcttcgggcgcacccacgagaagggccggcagtccaccaggctcaagatgctggaggtgccctacgtggaccgcaacagctgcaagctgtccagcagcttcatcatcacccagaacatgttctgtgccggctacgacaccaagcaggaggatgcctgccagggggacagcgggggcccgcacgtcacccgcttcaaggacacctacttcgtgacaggcatcgtcagctggggagagggctgtgcccgtaaggggaagtacgggatctacaccaaggtcaccgccttcctcaagtggatcgacaggtccatgaaaaccaggggcttgcccaaggccaagagccatgccccggaggtcataacgtcctctccattaaaa

SEQ ID NO: 60 - protein, 451 aa, Artificial
  Recombinant
ANSFLEEMKKGHLERECMEETCSYEEAREVFEDSDKTNEFWNKYKDGDQCETSPCQNQGKCKDGLGEYTCTCLEGFEGKNCELFTRKLCSLDNGDCDQFCHEEQNSVVCSCARGYTLADNGKACIPTGPYPCGKQTLERRKRSVAQATSSSGEAPDSITWKPYDAADLDPTENPFDLLDFNQTQPERGDNNATLDPRIVGGQECKDGECPWQALLINEENEGFCGGTILSEFYILTAAHCLYQAKRFKVRVGDRNTEQEEGGEAVHEVEVVIKHNRFTKETYDFDIAVLRLKTPITFRMNVAPACLPERDWAESTLMTQKTGIVSGFGRTHEKGRQSTRLKMLEVPYVDRNSCKLSSSFIITQNMFCAGYDTKQEDACQGDSGGPHVTRFKDTYFVTGIVSWGEGCARKGKYGIYTKVTAFLKWIDRSMKTRGLPKAKSHAPEVITSSPLK

SEQ ID NO: 61 - DNA, 1386 bp, Artificial
  Recombinant
gccaattcctttcttgaagagatgaagaaaggacacctcgaaagagagtgcatggaagagacctgctcatacgaagaggcccgcgaggtctttgaggacagcgacaagacgaatgaattctggaataaatacaaagatggcgaccagtgtgagaccagtccttgccagaaccagggcaaatgtaaagacggcctcggggaatacacctgcacctgtttagaaggattcgaaggcaaaaactgtgaattattcacacggaagctctgcagcctggacaacggggactgtgaccagttctgccacgaggaacagaactctgtggtgtgctcctgcgcccgcgggtacaccctggctgacaacggcaaggcctgcattcccacagggccctacccctgtgggaaacagaccctggaacgcaggaagaggtcagtggcccaggccaccagcagcagcggggaggcccctgacagcatcacatggaagccatatgatgcagccgacctggaccccaccgagaaccccttcgacctgcttgacttcaaccagacgcagcctgagaggggcgacaacaacgccaccctgcagcccaggatcgtgggaggccaggaatgcaaggacggggagtgtccctggcaggccctgctcatcaatgaggaaaacgagggtttctgtggtggaactattctgagcgagttctacatcctaacggcagcccactgtctctaccaagccaagagattcaaggtgagggtaggggaccggaacacggagcaggaggagggcggtgaggcggtgcacgaggtggaggtggtcatcaagcacaaccggttcacaaaggagacctatgacttcgacatcgccgtgctccggctcaagacccccatcaccttccgcatgaacgtggcgcctgcctgcctccccgagcgtgactgggccgagtccacgctgatgacgcagaagacggggattgtgagtggcttcgggcgcacccacgagaagggccggcagtccaccaggctcaagatgctggaggtgccctacgtggaccgcaacagctgcaagctgtccagcagcttcatcatcacccagaacatgttctgtgccggctacgacaccaagcaggaggatgcctgccagggggacagcgggggcccgcacgtcacccgcttcaaggacacctacttcgtgacaggcatcgtcagctggggagagggctgtgcccgtaaggggaagtacgggatctacaccaaggtcaccgccttcctcaagtggatcgacaggtccatgaaaaccaggggcttgcccaaggccaagagccatgccccggaggtcataacgtcctctccattaaaagaccaagtagatccgcggctcattgatgggaag

SEQ ID NO: 62 - protein, 462 aa, Artificial
  Recombinant
ANSFLEEMKKGHLERECMEETCSYEEAREVFEDSDKTNEFWNKYKDGDQCETSPCQNQGKCKDGLGEYTCTCLEGFEGKNCELFTRKLCSLDNGDCDQFCHEEQNSVVCSCARGYTLADNGKACIPTGPYPCGKQTLERRKRSVAQATSSSGEAPDSITWKPYDAADLDPTENPFDLLDFNQTQPERGDNNATLQPRIVGGQECKDGECPWQALLINEENEGFCGGTILSEFYILTAAHCLYQAKRFKVRVGDRNTEQEEGGEAVHEVEVVIKHNRFTKETYDFDIAVLRLKTPITFRMNVAPACLPERDWAESTLMTQKTGIVSGFGRTHEKGRQSTRLKMLEVPYVDRNSCKLSSSFIITQNMFCAGYDTKQEDACQGDSGGPHVTRFKDTYFVTGIVSWGEGCARKGKYGIYTKVTAFLKWIDRSMKTRGLPKAKSHAPEVITSSPLKDQVDPRLIDGK

SEQ ID NO: 63 - DNA, 1353 bp, Artificial
  Recombinant
gccaattcctttcttgaagagatgaagaaaggacacctcgaaagagagtgcatggaagagacctgctcatacgaagaggcccgcgaggtctttgaggacagcgacaagacgaatgaattctggaataaatacaaagatggcgaccagtgtgagaccagtccttgccagaaccagggcaaatgtaaagacggcctcggggaatacacctgcacctgtttagaaggattcgaaggcaaaaactgtgaattattcacacggaagctctgcagcctggacaacggggactgtgaccagttctgccacgaggaacagaactctgtggtgtgctcctgcgcccgcgggtacaccctggctgacaacggcaaggcctgcattcccacagggccctacccctgtgggaaacagaccctggaacgcaggaagaggtcagtggcccaggccaccagcagcagcggggaggcccctgacagcatcacatggaagccatatgatgcagccgacctggaccccaccgagaaccccttcgacctgcttgacttcaaccagacgcagcctgagaggggcgacaacaacgccaccctgcagcccaggatcgtgggaggccaggaatgcaaggacggggagtgtccctggcaggccctgctcatcaatgaggaaaacgagggtttctgtggtggaactattctgagcgagttctacatcctaacggcagcccactgtctctaccaagccaagagattcaaggtgagggtaggggaccggaacacggagcaggaggagggcggtgaggcggtgcacgaggtggaggtggtcatcaagcacaaccggttcacaaaggagacctatgacttcgacatcgccgtgctccggctcaagacccccatcaccttccgcatgaacgtggcgcctgcctgcctccccgagcgtgactgggccgagtccacgctgatgacgcagaagacggggattgtgagtggcttcgggcgcacccacgagaagggccggcagtccaccaggctcaagatgctggaggtgccctacgtggaccgcaacagctgcaagctgtccagcagcttcatcatcacccagaacatgttctgtgccggctacgacaccaagcaggaggatgcctgccagggggacagcgggggcccgcacgtcacccgcttcaaggacacctacttcgtgacaggcatcgtcagctggggagagggctgtgcccgtaaggggaagtacgggatctacaccaaggtcaccgccttcctcaagtggatcgacaggtccatgaaaaccaggggcttgcccaaggccaagagccatgccccggaggtcataacgtcctctccattaaaa

SEQ ID NO: 64 - protein, 451 aa, Artificial
  Recombinant
ANSFLEEMKKGHLERECMEETCSYEEAREVFEDSDKTNEFWNKYKDGDQCETSPCQNQGKCKDGLGEYTCTCLEGFEGKNCELFTRKLCSLDNGDCDQFCHEEQNSVVCSCARGYTLADNGKACIPTGPYPCGKQTLERRKRSVAQATSSSGEAPDSITWKPYDAADLDPTENPFDLLDFNQTQPERGDNNATLQPRIVGGQECKDGECPWQALLINEENEGFCGGTILSEFYILTAAHCLYQAKRFKVRVGDRNTEQEEGGEAVHEVEVVIKHNRFTKETYDFDIAVLRLKTPITFRMNVAPACLPERDWAESTLMTQKTGIVSGFGRTHEKGRQSTRLKMLEVPYVDRNSCKLSSSFIITQNMFCAGYDTKQEDACQGDSGGPHVTRFKDTYFVTGIVSWGEGCARKGKYGIYTKVTAFLKWIDRSMKTRGLPKAKSHAPEVITSSPLK

SEQ ID NO: 65 - DNA, 1386 bp, Artificial
  Recombinant
gccaattcctttcttgaagagatgaagaaaggacacctcgaaagagagtgcatggaagagacctgctcatacgaagaggcccgcgaggtctttgaggacagcgacaagacgaatgaattctggaataaatacaaagatggcgaccagtgtgagaccagtccttgccagaaccagggcaaatgtaaagacggcctcggggaatacacctgcacctgtttagaaggattcgaaggcaaaaactgtgaattattcacacggaagctctgcagcctggacaacggggactgtgaccagttctgccacgaggaacagaactctgtggtgtgctcctgcgcccgcgggtacaccctggctgacaacggcaaggcctgcattcccacagggccctacccctgtgggaaacagaccctggaacgcaggaagaggtcagtggcccaggccaccagcagcagcggggaggcccctgacagcatcacatggaagccatatgatgcagccgacctggaccccaccgagaaccccttcgacctgcttgacttcaaccagacgcagcctgagaggggcgacaacaacgccaccctgacccccaggatcgtgggaggccaggaatgcaaggacggggagtgtccctggcaggccctgctcatcaatgaggaaaacgagggtttctgtggtggaactattctgagcgagttctacatcctaacggcagcccactgtctctaccaagccaagagattcaaggtgagggtaggggaccggaacacggagcaggaggagggcggtgaggcggtgcacgaggtggaggtggtcatcaagcacaaccggttcacaaaggagacctatgacttcgacatcgccgtgctccggctcaagacccccatcaccttccgcatgaacgtggcgcctgcctgcctccccgagcgtgactgggccgagtccacgctgatgacgcagaagacggggattgtgagtggcttcgggcgcacccacgagaagggccggcagtccaccaggctcaagatgctggaggtgccctacgtggaccgcaacagctgcaagctgtccagcagcttcatcatcacccagaacatgttctgtgccggctacgacaccaagcaggaggatgcctgccagggggacagcgggggcccgcacgtcacccgcttcaaggacacctacttcgtgacaggcatcgtcagctggggagagggctgtgcccgtaaggggaagtacgggatctacaccaaggtcaccgccttcctcaagtggatcgacaggtccatgaaaaccaggggcttgcccaaggccaagagccatgccccggaggtcataacgtcctctccattaaaagaccaagtagatccgcggctcattgatgggaag

SEQ ID NO: 66 - protein, 462 aa, Artificial
  Recombinant
ANSFLEEMKKGHLERECMEETCSYEEAREVFEDSDKTNEFWNKYKDGDQCETSPCQNQGKCKDGLGEYTCTCLEGFEGKNCELFTRKLCSLDNGDCDQFCHEEQNSVVCSCARGYTLADNGKACIPTGPYPCGKQTLERRKRSVAQATSSSGEAPDSITWKPYDAADLDPTENPFDLLDFNQTQPERGDNNATLTPRIVGGQECKDGECPWQALLINEENEGFCGGTILSEFYILTAAHCLYQAKRFKVRVGDRNTEQEEGGEAVHEVEVVIKHNRFTKETYDFDIAVLRLKTPITFRMNVAPACLPERDWAESTLMTQKTGIVSGFGRTHEKGRQSTRLKMLEVPYVDRNSCKLSSSFIITQNMFCAGYDTKQEDACQGDSGGPHVTRFKDTYFVTGIVSWGEGCARKGKYGIYTKVTAFLKWIDRSMKTRGLPKAKSHAPEVITSSPLKDQVDPRLIDGK

SEQ ID NO: 67 - DNA, 1353 bp, Artificial
  Recombinant
gccaattcctttcttgaagagatgaagaaaggacacctcgaaagagagtgcatggaagagacctgctcatacgaagaggcccgcgaggtctttgaggacagcgacaagacgaatgaattctggaataaatacaaagatggcgaccagtgtgagaccagtccttgccagaaccagggcaaatgtaaagacggcctcggggaatacacctgcacctgtttagaaggattcgaaggcaaaaactgtgaattattcacacggaagctctgcagcctggacaacggggactgtgaccagttctgccacgaggaacagaactctgtggtgtgctcctgcgcccgcgggtacaccctggctgacaacggcaaggcctgcattcccacagggccctacccctgtgggaaacagaccctggaacgcaggaagaggtcagtggcccaggccaccagcagcagcggggaggcccctgacagcatcacatggaagccatatgatgcagccgacctggaccccaccgagaaccccttcgacctgcttgacttcaaccagacgcagcctgagaggggcgacaacaacgccaccctgacccccaggatcgtgggaggccaggaatgcaaggacggggagtgtccctggcaggccctgctcatcaatgaggaaaacgagggtttctgtggtggaactattctgagcgagttctacatcctaacggcagcccactgtctctaccaagccaagagattcaaggtgagggtaggggaccggaacacggagcaggaggagggcggtgaggcggtgcacgaggtggaggtggtcatcaagcacaaccggttcacaaaggagacctatgacttcgacatcgccgtgctccggctcaagacccccatcaccttccgcatgaacgtggcgcctgcctgcctccccgagcgtgactgggccgagtccacgctgatgacgcagaagacggggattgtgagtggcttcgggcgcacccacgagaagggccggcagtccaccaggctcaagatgctggaggtgccctacgtggaccgcaacagctgcaagctgtccagcagcttcatcatcacccagaacatgttctgtgccggctacgacaccaagcaggaggatgcctgccagggggacagcgggggcccgcacgtcacccgcttcaaggacacctacttcgtgacaggcatcgtcagctggggagagggctgtgcccgtaaggggaagtacgggatctacaccaaggtcaccgccttcctcaagtggatcgacaggtccatgaaaaccaggggcttgcccaaggccaagagccatgccccggaggtcataacgtcctctccattaaaa

SEQ ID NO: 68 - protein, 451 aa, Artificial
  Recombinant
ANSFLEEMKKGHLERECMEETCSYEEAREVFEDSDKTNEFWNKYKDGDQCETSPCQNQGKCKDGLGEYTCTCLEGFEGKNCELFTRKLCSLDNGDCDQFCHEEQNSVVCSCARGYTLADNGKACIPTGPYPCGKQTLERRKRSVAQATSSSGEAPDSITWKPYDAADLDPTENPFDLLDFNQTQPERGDNNATLTPRIVGGQECKDGECPWQALLINEENEGFCGGTILSEFYILTAAHCLYQAKRFKVRVGDRNTEQEEGGEAVHEVEVVIKHNRFTKETYDFDIAVLRLKTPITFRMNVAPACLPERDWAESTLMTQKTGIVSGFGRTHEKGRQSTRLKMLEVPYVDRNSCKLSSSFIITQNMFCAGYDTKQEDACQGDSGGPHVTRFKDTYFVTGIVSWGEGCARKGKYGIYTKVTAFLKWIDRSMKTRGLPKAKSHAPEVITSSPLK

SEQ ID NO: 69 - DNA, 1386 bp, Artificial
  Recombinant
gccaattcctttcttgaagagatgaagaaaggacacctcgaaagagagtgcatggaagagacctgctcatacgaagaggcccgcgaggtctttgaggacagcgacaagacgaatgaattctggaataaatacaaagatggcgaccagtgtgagaccagtccttgccagaaccagggcaaatgtaaagacggcctcggggaatacacctgcacctgtttagaaggattcgaaggcaaaaactgtgaattattcacacggaagctctgcagcctggacaacggggactgtgaccagttctgccacgaggaacagaactctgtggtgtgctcctgcgcccgcgggtacaccctggctgacaacggcaaggcctgcattcccacagggccctacccctgtgggaaacagaccctggaacgcaggaagaggtcagtggcccaggccaccagcagcagcggggaggcccctgacagcatcacatggaagccatatgatgcagccgacctggaccccaccgagaaccccttcgacctgcttgacttcaaccagacgcagcctgagaggggcgacaacaacgccaccatgcagcccaggatcgtgggaggccaggaatgcaaggacggggagtgtccctggcaggccctgctcatcaatgaggaaaacgagggtttctgtggtggaactattctgagcgagttctacatcctaacggcagcccactgtctctaccaagccaagagattcaaggtgagggtaggggaccggaacacggagcaggaggagggcggtgaggcggtgcacgaggtggaggtggtcatcaagcacaaccggttcacaaaggagacctatgacttcgacatcgccgtgctccggctcaagacccccatcaccttccgcatgaacgtggcgcctgcctgcctccccgagcgtgactgggccgagtccacgctgatgacgcagaagacggggattgtgagtggcttcgggcgcacccacgagaagggccggcagtccaccaggctcaagatgctggaggtgccctacgtggaccgcaacagctgcaagctgtccagcagcttcatcatcacccagaacatgttctgtgccggctacgacaccaagcaggaggatgcctgccagggggacagcgggggcccgcacgtcacccgcttcaaggacacctacttcgtgacaggcatcgtcagctggggagagggctgtgcccgtaaggggaagtacgggatctacaccaaggtcaccgccttcctcaagtggatcgacaggtccatgaaaaccaggggcttgcccaaggccaagagccatgccccggaggtcataacgtcctctccattaaaagaccaagtagatccgcggctcattgatgggaag

SEQ ID NO: 70 - protein, 462 aa, Artificial
  Recombinant
ANSFLEEMKKGHLERECMEETCSYEEAREVFEDSDKTNEFWNKYKDGDQCETSPCQNQGKCKDGLGEYTCTCLEGFEGKNCELFTRKLCSLDNGDCDQFCHEEQNSVVCSCARGYTLADNGKACIPTGPYPCGKQTLERRKRSVAQATSSSGEAPDSITWKPYDAADLDPTENPFDLLDFNQTQPERGDNNATMQPRIVGGQECKDGECPWQALLINEENEGFCGGTILSEFYILTAAHCLYQAKRFKVRVGDRNTEQEEGGEAVHEVEVVIKHNRFTKETYDFDIAVLRLKTPITFRMNVAPACLPERDWAESTLMTQKTGIVSGFGRTHEKGRQSTRLKMLEVPYVDRNSCKLSSSFIITQNMFCAGYDTKQEDACQGDSGGPHVTRFKDTYFVTGIVSWGEGCARKGKYGIYTKVTAFLKWIDRSMKTRGLPKAKSHAPEVITSSPLKDQVDPRLIDGK

SEQ ID NO: 71 - DNA, 1353 bp, Artificial
  Recombinant
gccaattcctttcttgaagagatgaagaaaggacacctcgaaagagagtgcatggaagagacctgctcatacgaagaggcccgcgaggtctttgaggacagcgacaagacgaatgaattctggaataaatacaaagatggcgaccagtgtgagaccagtccttgccagaaccagggcaaatgtaaagacggcctcggggaatacacctgcacctgtttagaaggattcgaaggcaaaaactgtgaattattcacacggaagctctgcagcctggacaacggggactgtgaccagttctgccacgaggaacagaactctgtggtgtgctcctgcgcccgcgggtacaccctggctgacaacggcaaggcctgcattcccacagggccctacccctgtgggaaacagaccctggaacgcaggaagaggtcagtggcccaggccaccagcagcagcggggaggcccctgacagcatcacatggaagccatatgatgcagccgacctggaccccaccgagaaccccttcgacctgcttgacttcaaccagacgcagcctgagaggggcgacaacaacgccaccatgcagcccaggatcgtgggaggccaggaatgcaaggacggggagtgtccctggcaggccctgctcatcaatgaggaaaacgagggtttctgtggtggaactattctgagcgagttctacatcctaacggcagcccactgtctctaccaagccaagagattcaaggtgagggtaggggaccggaacacggagcaggaggagggcggtgaggcggtgcacgaggtggaggtggtcatcaagcacaaccggttcacaaaggagacctatgacttcgacatcgccgtgctccggctcaagacccccatcaccttccgcatgaacgtggcgcctgcctgcctccccgagcgtgactgggccgagtccacgctgatgacgcagaagacggggattgtgagtggcttcgggcgcacccacgagaagggccggcagtccaccaggctcaagatgctggaggtgccctacgtggaccgcaacagctgcaagctgtccagcagcttcatcatcacccagaacatgttctgtgccggctacgacaccaagcaggaggatgcctgccagggggacagcgggggcccgcacgtcacccgcttcaaggacacctacttcgtgacaggcatcgtcagctggggagagggctgtgcccgtaaggggaagtacgggatctacaccaaggtcaccgccttcctcaagtggatcgacaggtccatgaaaaccaggggcttgcccaaggccaagagccatgccccggaggtcataacgtcctctccattaaaa

SEQ ID NO: 72 - protein, 451 aa, Artificial
  Recombinant
ANSFLEEMKKGHLERECMEETCSYEEAREVFEDSDKTNEFWNKYKDGDQCETSPCQNQGKCKDGLGEYTCTCLEGFEGKNCELFTRKLCSLDNGDCDQFCHEEQNSVVCSCARGYTLADNGKACIPTGPYPCGKQTLERRKRSVAQATSSSGEAPDSITWKPYDAADLDPTENPFDLLDFNQTQPERGDNNATMQPRIVGGQECKDGECPWQALLINEENEGFCGGTILSEFYILTAAHCLYQAKRFKVRVGDRNTEQEEGGEAVHEVEVVIKHNRFTKETYDFDIAVLRLKTPITFRMNVAPACLPERDWAESTLMTQKTGIVSGFGRTHEKGRQSTRLKMLEVPYVDRNSCKLSSSFIITQNMFCAGYDTKQEDACQGDSGGPHVTRFKDTYFVTGIVSWGEGCARKGKYGIYTKVTAFLKWIDRSMKTRGLPKAKSHAPEVITSSPLK

SEQ ID NO: 73 - DNA, 1386 bp, Artificial
  Recombinant
gccaattcctttcttgaagagatgaagaaaggacacctcgaaagagagtgcatggaagagacctgctcatacgaagaggcccgcgaggtctttgaggacagcgacaagacgaatgaattctggaataaatacaaagatggcgaccagtgtgagaccagtccttgccagaaccagggcaaatgtaaagacggcctcggggaatacacctgcacctgtttagaaggattcgaaggcaaaaactgtgaattattcacacggaagctctgcagcctggacaacggggactgtgaccagttctgccacgaggaacagaactctgtggtgtgctcctgcgcccgcgggtacaccctggctgacaacggcaaggcctgcattcccacagggccctacccctgtgggaaacagaccctggaacgcaggaagaggtcagtggcccaggccaccagcagcagcggggaggcccctgacagcatcacatggaagccatatgatgcagccgacctggaccccaccgagaaccccttcgacctgcttgacttcaaccagacgcagcctgagaggggcgacaacaacgccaccatcaagcccaggatcgtgggaggccaggaatgcaaggacggggagtgtccctggcaggccctgctcatcaatgaggaaaacgagggtttctgtggtggaactattctgagcgagttctacatcctaacggcagcccactgtctctaccaagccaagagattcaaggtgagggtaggggaccggaacacggagcaggaggagggcggtgaggcggtgcacgaggtggaggtggtcatcaagcacaaccggttcacaaaggagacctatgacttcgacatcgccgtgctccggctcaagacccccatcaccttccgcatgaacgtggcgcctgcctgcctccccgagcgtgactgggccgagtccacgctgatgacgcagaagacggggattgtgagtggcttcgggcgcacccacgagaagggccggcagtccaccaggctcaagatgctggaggtgccctacgtggaccgcaacagctgcaagctgtccagcagcttcatcatcacccagaacatgttctgtgccggctacgacaccaagcaggaggatgcctgccagggggacagcgggggcccgcacgtcacccgcttcaaggacacctacttcgtgacaggcatcgtcagctggggagagggctgtgcccgtaaggggaagtacgggatctacaccaaggtcaccgccttcctcaagtggatcgacaggtccatgaaaaccaggggcttgcccaaggccaagagccatgccccggaggtcataacgtcctctccattaaaagaccaagtagatccgcggctcattgatgggaag

SEQ ID NO: 74 - protein, 462 aa, Artificial
  Recombinant
ANSFLEEMKKGHLERECMEETCSYEEAREVFEDSDKTNEFWNKYKDGDQCETSPCQNQGKCKDGLGEYTCTCLEGFEGKNCELFTRKLCSLDNGDCDQFCHEEQNSVVCSCARGYTLADNGKACIPTGPYPCGKQTLERRKRSVAQATSSSGEAPDSITWKPYDAADLDPTENPFDLLDFNQTQPERGDNNATIKPRIVGGQECKDGECPWQALLINEENEGFCGGTILSEFYILTAAHCLYQAKRFKVRVGDRNTEQEEGGEAVHEVEVVIKHNRFTKETYDFDIAVLRLKTPITFRMNVAPACLPERDWAESTLMTQKTGIVSGFGRTHEKGRQSTRLKMLEVPYVDRNSCKLSSSFIITQNMFCAGYDTKQEDACQGDSGGPHVTRFKDTYFVTGIVSWGEGCARKGKYGIYTKVTAFLKWIDRSMKTRGLPKAKSHAPEVITSSPLKDQVDPRLIDGK

SEQ ID NO: 75 - DNA, 1353 bp, Artificial
  Recombinant
gccaattcctttcttgaagagatgaagaaaggacacctcgaaagagagtgcatggaagagacctgctcatacgaagaggcccgcgaggtctttgaggacagcgacaagacgaatgaattctggaataaatacaaagatggcgaccagtgtgagaccagtccttgccagaaccagggcaaatgtaaagacggcctcggggaatacacctgcacctgtttagaaggattcgaaggcaaaaactgtgaattattcacacggaagctctgcagcctggacaacggggactgtgaccagttctgccacgaggaacagaactctgtggtgtgctcctgcgcccgcgggtacaccctggctgacaacggcaaggcctgcattcccacagggccctacccctgtgggaaacagaccctggaacgcaggaagaggtcagtggcccaggccaccagcagcagcggggaggcccctgacagcatcacatggaagccatatgatgcagccgacctggaccccaccgagaaccccttcgacctgcttgacttcaaccagacgcagcctgagaggggcgacaacaacgccaccatcaagcccaggatcgtgggaggccaggaatgcaaggacggggagtgtccctggcaggccctgctcatcaatgaggaaaacgagggtttctgtggtggaactattctgagcgagttctacatcctaacggcagcccactgtctctaccaagccaagagattcaaggtgagggtaggggaccggaacacggagcaggaggagggcggtgaggcggtgcacgaggtggaggtggtcatcaagcacaaccggttcacaaaggagacctatgacttcgacatcgccgtgctccggctcaagacccccatcaccttccgcatgaacgtggcgcctgcctgcctccccgagcgtgactgggccgagtccacgctgatgacgcagaagacggggattgtgagtggcttcgggcgcacccacgagaagggccggcagtccaccaggctcaagatgctggaggtgccctacgtggaccgcaacagctgcaagctgtccagcagcttcatcatcacccagaacatgttctgtgccggctacgacaccaagcaggaggatgcctgccagggggacagcgggggcccgcacgtcacccgcttcaaggacacctacttcgtgacaggcatcgtcagctggggagagggctgtgcccgtaaggggaagtacgggatctacaccaaggtcaccgccttcctcaagtggatcgacaggtccatgaaaaccaggggcttgcccaaggccaagagccatgccccggaggtcataacgtcctctccattaaaa

SEQ ID NO: 76 - protein, 451 aa, Artificial
  Recombinant
ANSFLEEMKKGHLERECMEETCSYEEAREVFEDSDKTNEFWNKYKDGDQCETSPCQNQGKCKDGLGEYTCTCLEGFEGKNCELFTRKLCSLDNGDCDQFCHEEQNSVVCSCARGYTLADNGKACIPTGPYPCGKQTLERRKRSVAQATSSSGEAPDSITWKPYDAADLDPTENPFDLLDFNQTQPERGDNNATIKPRIVGGQECKDGECPWQALLINEENEGFCGGTILSEFYILTAAHCLYQAKRFKVRVGDRNTEQEEGGEAVHEVEVVIKHNRFTKETYDFDIAVLRLKTPITFRMNVAPACLPERDWAESTLMTQKTGIVSGFGRTHEKGRQSTRLKMLEVPYVDRNSCKLSSSFIITQNMFCAGYDTKQEDACQGDSGGPHVTRFKDTYFVTGIVSWGEGCARKGKYGIYTKVTAFLKWIDRSMKTRGLPKAKSHAPEVITSSPLK

SEQ ID NO: 77 - DNA, 1386 bp, Artificial
  Recombinant
gccaattcctttcttgaagagatgaagaaaggacacctcgaaagagagtgcatggaagagacctgctcatacgaagaggcccgcgaggtctttgaggacagcgacaagacgaatgaattctggaataaatacaaagatggcgaccagtgtgagaccagtccttgccagaaccagggcaaatgtaaagacggcctcggggaatacacctgcacctgtttagaaggattcgaaggcaaaaactgtgaattattcacacggaagctctgcagcctggacaacggggactgtgaccagttctgccacgaggaacagaactctgtggtgtgctcctgcgcccgcgggtacaccctggctgacaacggcaaggcctgcattcccacagggccctacccctgtgggaaacagaccctggaacgcaggaagaggtcagtggcccaggccaccagcagcagcggggaggcccctgacagcatcacatggaagccatatgatgcagccgacctggaccccaccgagaaccccttcgacctgcttgacttcaaccagacgcagcctgagaggggcgacaacaacgccaccctggagcccaggatcgtgggaggccaggaatgcaaggacggggagtgtccctggcaggccctgctcatcaatgaggaaaacgagggtttctgtggtggaactattctgagcgagttctacatcctaacggcagcccactgtctctaccaagccaagagattcaaggtgagggtaggggaccggaacacggagcaggaggagggcggtgaggcggtgcacgaggtggaggtggtcatcaagcacaaccggttcacaaaggagacctatgacttcgacatcgccgtgctccggctcaagacccccatcaccttccgcatgaacgtggcgcctgcctgcctccccgagcgtgactgggccgagtccacgctgatgacgcagaagacggggattgtgagtggcttcgggcgcacccacgagaagggccggcagtccaccaggctcaagatgctggaggtgccctacgtggaccgcaacagctgcaagctgtccagcagcttcatcatcacccagaacatgttctgtgccggctacgacaccaagcaggaggatgcctgccagggggacagcgggggcccgcacgtcacccgcttcaaggacacctacttcgtgacaggcatcgtcagctggggagagggctgtgcccgtaaggggaagtacgggatctacaccaaggtcaccgccttcctcaagtggatcgacaggtccatgaaaaccaggggcttgcccaaggccaagagccatgccccggaggtcataacgtcctctccattaaaagaccaagtagatccgcggctcattgatgggaag

SEQ ID NO: 78 - protein, 462 aa, Artificial
  Recombinant
ANSFLEEMKKGHLERECMEETCSYEEAREVFEDSDKTNEFWNKYKDGDQCETSPCQNQGKCKDGLGEYTCTCLEGFEGKNCELFTRKLCSLDNGDCDQFCHEEQNSVVCSCARGYTLADNGKACIPTGPYPCGKQTLERRKRSVAQATSSSGEAPDSITWKPYDAADLDPTENPFDLLDFNQTQPERGDNNATLEPRIVGGQECKDGECPWQALLINEENEGFCGGTILSEFYILTAAHCLYQAKRFKVRVGDRNTEQEEGGEAVHEVEVVIKHNRFTKETYDFDIAVLRLKTPITFRMNVAPACLPERDWAESTLMTQKTGIVSGFGRTHEKGRQSTRLKMLEVPYVDRNSCKLSSSFIITQNMFCAGYDTKQEDACQGDSGGPHVTRFKDTYFVTGIVSWGEGCARKGKYGIYTKVTAFLKWIDRSMKTRGLPKAKSHAPEVITSSPLKDQVDPRLIDGK

SEQ ID NO: 79 - DNA, 1353 bp, Artificial
  Recombinant
gccaattcctttcttgaagagatgaagaaaggacacctcgaaagagagtgcatggaagagacctgctcatacgaagaggcccgcgaggtctttgaggacagcgacaagacgaatgaattctggaataaatacaaagatggcgaccagtgtgagaccagtccttgccagaaccagggcaaatgtaaagacggcctcggggaatacacctgcacctgtttagaaggattcgaaggcaaaaactgtgaattattcacacggaagctctgcagcctggacaacggggactgtgaccagttctgccacgaggaacagaactctgtggtgtgctcctgcgcccgcgggtacaccctggctgacaacggcaaggcctgcattcccacagggccctacccctgtgggaaacagaccctggaacgcaggaagaggtcagtggcccaggccaccagcagcagcggggaggcccctgacagcatcacatggaagccatatgatgcagccgacctggaccccaccgagaaccccttcgacctgcttgacttcaaccagacgcagcctgagaggggcgacaacaacgccaccctggagcccaggatcgtgggaggccaggaatgcaaggacggggagtgtccctggcaggccctgctcatcaatgaggaaaacgagggtttctgtggtggaactattctgagcgagttctacatcctaacggcagcccactgtctctaccaagccaagagattcaaggtgagggtaggggaccggaacacggagcaggaggagggcggtgaggcggtgcacgaggtggaggtggtcatcaagcacaaccggttcacaaaggagacctatgacttcgacatcgccgtgctccggctcaagacccccatcaccttccgcatgaacgtggcgcctgcctgcctccccgagcgtgactgggccgagtccacgctgatgacgcagaagacggggattgtgagtggcttcgggcgcacccacgagaagggccggcagtccaccaggctcaagatgctggaggtgccctacgtggaccgcaacagctgcaagctgtccagcagcttcatcatcacccagaacatgttctgtgccggctacgacaccaagcaggaggatgcctgccagggggacagcgggggcccgcacgtcacccgcttcaaggacacctacttcgtgacaggcatcgtcagctggggagagggctgtgcccgtaaggggaagtacgggatctacaccaaggtcaccgccttcctcaagtggatcgacaggtccatgaaaaccaggggcttgcccaaggccaagagccatgccccggaggtcataacgtcctctccattaaaa

SEQ ID NO: 80 - protein, 451 aa, Artificial
  Recombinant
ANSFLEEMKKGHLERECMEETCSYEEAREVFEDSDKTNEFWNKYKDGDQCETSPCQNQGKCKDGLGEYTCTCLEGFEGKNCELFTRKLCSLDNGDCDQFCHEEQNSVVCSCARGYTLADNGKACIPTGPYPCGKQTLERRKRSVAQATSSSGEAPDSITWKPYDAADLDPTENPFDLLDFNQTQPERGDNNATLEPRIVGGQECKDGECPWQALLINEENEGFCGGTILSEFYILTAAHCLYQAKRFKVRVGDRNTEQEEGGEAVHEVEVVIKHNRFTKETYDFDIAVLRLKTPITFRMNVAPACLPERDWAESTLMTQKTGIVSGFGRTHEKGRQSTRLKMLEVPYVDRNSCKLSSSFIITQNMFCAGYDTKQEDACQGDSGGPHVTRFKDTYFVTGIVSWGEGCARKGKYGIYTKVTAFLKWIDRSMKTRGLPKAKSHAPEVITSSPLK

SEQ ID NO: 81 - DNA, 1385 bp, Artificial
  Recombinant
gccaattcctttcttgaagagatgaagaaaggacacctcgaaagagagtgcatggaagagacctgctcatacgaagaggcccgcgaggtctttgaggacagcgacaagacgaatgaattctggaataaatacaaagatggcgaccagtgtgagaccagtccttgccagaaccagggcaaatgtaaagacggcctcggggaatacacctgcacctgtttagaaggattcgaaggcaaaaactgtgaattattcacacggaagctctgcagcctggacaacggggactgtgaccagttctgccacgaggaacagaactctgtggtgtgctcctgcgcccgcgggtacaccctggctgacaacggcaaggcctgcattcccacagggccctacccctgtgggaaacagaccctggaacgcaggaagaggtcagtggcccaggccaccagcagcagcggggaggcccctgacagcatcacatggaagccatatgatgcagccgacctggaccccaccgagaaccccttcgacctgcttgacttcaaccagacgcagcctgagaggggcgacaacaacgccaccgacacccccaggatcgtgggaggccaggaatgcaaggacggggagtgtccctggcaggccctgctcatcaatgaggaaaacgagggtttctgtggtggaactattctgagcgagttctacatcctaacggcagcccactgtctctaccaagccaagagattcaaggtgagggtaggggaccggaacacggagcaggaggagggcggtgaggcggtgcacgaggtggaggtggtcatcaagcacaaccggttcacaaaggagacctatgacttcgacatcgccgtgctccggctcaagacccccatcaccttccgcatgaacgtggcgcctgcctgcctccccgagcgtgactgggccgagtccacgctgatgacgcagaagacggggattgtgagtggcttcgggcgcacccacgagaagggccggcagtccaccaggctcaagatgctggaggtgccctacgtggaccgcaacagctgcaagctgtccagcagcttcatcatcacccagaacatgttctgtgccggctacgacaccaagcaggaggatgcctgccagggggacagcgggggcccgcacgtcacccgcttcaaggacacctacttcgtgacaggcatcgtcagctggggagagggctgtgcccgtaaggggaagtacgggatctacaccaaggtcaccgccttcctcaagtggatcgacaggtccatgaaaaccaggggcttgcccaaggccaagagccatgccccggaggtcataacgtcctctccattaaaagaccaagtagatccgcggctcattgatgggaa

SEQ ID NO: 82 - protein, 462 aa, Artificial
  Recombinant
ANSFLEEMKKGHLERECMEETCSYEEAREVFEDSDKTNEFWNKYKDGDQCETSPCQNQGKCKDGLGEYTCTCLEGFEGKNCELFTRKLCSLDNGDCDQFCHEEQNSVVCSCARGYTLADNGKACIPTGPYPCGKQTLERRKRSVAQATSSSGEAPDSITWKPYDAADLDPTENPFDLLDFNQTQPERGDNNATDTPRIVGGQECKDGECPWQALLINEENEGFCGGTILSEFYILTAAHCLYQAKRFKVRVGDRNTEQEEGGEAVHEVEVVIKHNRFTKETYDFDIAVLRLKTPITFRMNVAPACLPERDWAESTLMTQKTGIVSGFGRTHEKGRQSTRLKMLEVPYVDRNSCKLSSSFIITQNMFCAGYDTKQEDACQGDSGGPHVTRFKDTYFVTGIVSWGEGCARKGKYGIYTKVTAFLKWIDRSMKTRGLPKAKSHAPEVITSSPLKDQVDPRLIDGK

SEQ ID NO: 83 - DNA, 1353 bp, Artificial
  Recombinant
gccaattcctttcttgaagagatgaagaaaggacacctcgaaagagagtgcatggaagagacctgctcatacgaagaggcccgcgaggtctttgaggacagcgacaagacgaatgaattctggaataaatacaaagatggcgaccagtgtgagaccagtccttgccagaaccagggcaaatgtaaagacggcctcggggaatacacctgcacctgtttagaaggattcgaaggcaaaaactgtgaattattcacacggaagctctgcagcctggacaacggggactgtgaccagttctgccacgaggaacagaactctgtggtgtgctcctgcgcccgcgggtacaccctggctgacaacggcaaggcctgcattcccacagggccctacccctgtgggaaacagaccctggaacgcaggaagaggtcagtggcccaggccaccagcagcagcggggaggcccctgacagcatcacatggaagccatatgatgcagccgacctggaccccaccgagaaccccttcgacctgcttgacttcaaccagacgcagcctgagaggggcgacaacaacgccaccgacacccccaggatcgtgggaggccaggaatgcaaggacggggagtgtccctggcaggccctgctcatcaatgaggaaaacgagggtttctgtggtggaactattctgagcgagttctacatcctaacggcagcccactgtctctaccaagccaagagattcaaggtgagggtaggggaccggaacacggagcaggaggagggcggtgaggcggtgcacgaggtggaggtggtcatcaagcacaaccggttcacaaaggagacctatgacttcgacatcgccgtgctccggctcaagacccccatcaccttccgcatgaacgtggcgcctgcctgcctccccgagcgtgactgggccgagtccacgctgatgacgcagaagacggggattgtgagtggcttcgggcgcacccacgagaagggccggcagtccaccaggctcaagatgctggaggtgccctacgtggaccgcaacagctgcaagctgtccagcagcttcatcatcacccagaacatgttctgtgccggctacgacaccaagcaggaggatgcctgccagggggacagcgggggcccgcacgtcacccgcttcaaggacacctacttcgtgacaggcatcgtcagctggggagagggctgtgcccgtaaggggaagtacgggatctacaccaaggtcaccgccttcctcaagtggatcgacaggtccatgaaaaccaggggcttgcccaaggccaagagccatgccccggaggtcataacgtcctctccattaaaa

SEQ ID NO: 84 - protein, 451 aa, Artificial
  Recombinant
ANSFLEEMKKGHLERECMEETCSYEEAREVFEDSDKTNEFWNKYKDGDQCETSPCQNQGKCKDGLGEYTCTCLEGFEGKNCELFTRKLCSLDNGDCDQFCHEEQNSVVCSCARGYTLADNGKACIPTGPYPCGKQTLERRKRSVAQATSSSGEAPDSITWKPYDAADLDPTENPFDLLDFNQTQPERGDNNATDTPRIVGGQECKDGECPWQALLINEENEGFCGGTILSEFYILTAAHCLYQAKRFKVRVGDRNTEQEEGGEAVHEVEVVIKHNRFTKETYDFDIAVLRLKTPITFRMNVAPACLPERDWAESTLMTQKTGIVSGFGRTHEKGRQSTRLKMLEVPYVDRNSCKLSSSFIITQNMFCAGYDTKQEDACQGDSGGPHVTRFKDTYFVTGIVSWGEGCARKGKYGIYTKVTAFLKWIDRSMKTRGLPKAKSHAPEVITSSPLK

SEQ ID NO: 85 - DNA, 1386 bp, Artificial
  Recombinant
gccaattcctttcttgaagagatgaagaaaggacacctcgaaagagagtgcatggaagagacctgctcatacgaagaggcccgcgaggtctttgaggacagcgacaagacgaatgaattctggaataaatacaaagatggcgaccagtgtgagaccagtccttgccagaaccagggcaaatgtaaagacggcctcggggaatacacctgcacctgtttagaaggattcgaaggcaaaaactgtgaattattcacacggaagctctgcagcctggacaacggggactgtgaccagttctgccacgaggaacagaactctgtggtgtgctcctgcgcccgcgggtacaccctggctgacaacggcaaggcctgcattcccacagggccctacccctgtgggaaacagaccctggaacgcaggaagaggtcagtggcccaggccaccagcagcagcggggaggcccctgacagcatcacatggaagccatatgatgcagccgacctggaccccaccgagaaccccttcgacctgcttgacttcaaccagacgcagcctgagaggggcgacaacaacgccaccctgaagcccaggatcgtgggaggccaggaatgcaaggacggggagtgtccctggcaggccctgctcatcaatgaggaaaacgagggtttctgtggtggaactattctgagcgagttctacatcctaacggcagcccactgtctctaccaagccaagagattcaaggtgagggtaggggaccggaacacggagcaggaggagggcggtgaggcggtgcacgaggtggaggtggtcatcaagcacaaccggttcacaaaggagacctatgacttcgacatcgccgtgctccggctcaagacccccatcaccttccgcatgaacgtggcgcctgcctgcctccccgagcgtgactgggccgagtccacgctgatgacgcagaagacggggattgtgagtggcttcgggcgcacccacgagaagggccggcagtccaccaggctcaagatgctggaggtgccctacgtggaccgcaacagctgcaagctgtccagcagcttcatcatcacccagaacatgttctgtgccggctacgacaccaagcaggaggatgcctgccagggggacagcgggggcccgcacgtcacccgcttcaaggacacctacttcgtgacaggcatcgtcagctggggagagggctgtgcccgtaaggggaagtacgggatctacaccaaggtcaccgccttcctcaagtggatcgacaggtccatgaaaaccaggggcttgcccaaggccaagagccatgccccggaggtcataacgtcctctccattaaaagaccaagtagatccgcggctcattgatgggaag

SEQ ID NO: 86 - protein, 462 aa, Artificial
  Recombinant
ANSFLEEMKKGHLERECMEETCSYEEAREVFEDSDKTNEFWNKYKDGDQCETSPCQNQGKCKDGLGEYTCTCLEGFEGKNCELFTRKLCSLDNGDCDQFCHEEQNSVVCSCARGYTLADNGKACIPTGPYPCGKQTLERRKRSVAQATSSSGEAPDSITWKPYDAADLDPTENPFDLLDFNQTQPERGDNNATLKPRIVGGQECKDGECPWQALLINEENEGFCGGTILSEFYILTAAHCLYQAKRFKVRVGDRNTEQEEGGEAVHEVEVVIKHNRFTKETYDFDIAVLRLKTPITFRMNVAPACLPERDWAESTLMTQKTGIVSGFGRTHEKGRQSTRLKMLEVPYVDRNSCKLSSSFIITQNMFCAGYDTKQEDACQGDSGGPHVTRFKDTYFVTGIVSWGEGCARKGKYGIYTKVTAFLKWIDRSMKTRGLPKAKSHAPEVITSSPLKDQVDPRLIDGK

SEQ ID NO: 87 - DNA, 1353 bp, Artificial
  Recombinant
gccaattcctttcttgaagagatgaagaaaggacacctcgaaagagagtgcatggaagagacctgctcatacgaagaggcccgcgaggtctttgaggacagcgacaagacgaatgaattctggaataaatacaaagatggcgaccagtgtgagaccagtccttgccagaaccagggcaaatgtaaagacggcctcggggaatacacctgcacctgtttagaaggattcgaaggcaaaaactgtgaattattcacacggaagctctgcagcctggacaacggggactgtgaccagttctgccacgaggaacagaactctgtggtgtgctcctgcgcccgcgggtacaccctggctgacaacggcaaggcctgcattcccacagggccctacccctgtgggaaacagaccctggaacgcaggaagaggtcagtggcccaggccaccagcagcagcggggaggcccctgacagcatcacatggaagccatatgatgcagccgacctggaccccaccgagaaccccttcgacctgcttgacttcaaccagacgcagcctgagaggggcgacaacaacgccaccctgaagcccaggatcgtgggaggccaggaatgcaaggacggggagtgtccctggcaggccctgctcatcaatgaggaaaacgagggtttctgtggtggaactattctgagcgagttctacatcctaacggcagcccactgtctctaccaagccaagagattcaaggtgagggtaggggaccggaacacggagcaggaggagggcggtgaggcggtgcacgaggtggaggtggtcatcaagcacaaccggttcacaaaggagacctatgacttcgacatcgccgtgctccggctcaagacccccatcaccttccgcatgaacgtggcgcctgcctgcctccccgagcgtgactgggccgagtccacgctgatgacgcagaagacggggattgtgagtggcttcgggcgcacccacgagaagggccggcagtccaccaggctcaagatgctggaggtgccctacgtggaccgcaacagctgcaagctgtccagcagcttcatcatcacccagaacatgttctgtgccggctacgacaccaagcaggaggatgcctgccagggggacagcgggggcccgcacgtcacccgcttcaaggacacctacttcgtgacaggcatcgtcagctggggagagggctgtgcccgtaaggggaagtacgggatctacaccaaggtcaccgccttcctcaagtggatcgacaggtccatgaaaaccaggggcttgcccaaggccaagagccatgccccggaggtcataacgtcctctccattaaaa

SEQ ID NO: 88 - protein, 451 aa, Artificial
  Recombinant
ANSFLEEMKKGHLERECMEETCSYEEAREVFEDSDKTNEFWNKYKDGDQCETSPCQNQGKCKDGLGEYTCTCLEGFEGKNCELFTRKLCSLDNGDCDQFCHEEQNSVVCSCARGYTLADNGKACIPTGPYPCGKQTLERRKRSVAQATSSSGEAPDSITWKPYDAADLDPTENPFDLLDFNQTQPERGDNNATLKPRIVGGQECKDGECPWQALLINEENEGFCGGTILSEFYILTAAHCLYQAKRFKVRVGDRNTEQEEGGEAVHEVEVVIKHNRFTKETYDFDIAVLRLKTPITFRMNVAPACLPERDWAESTLMTQKTGIVSGFGRTHEKGRQSTRLKMLEVPYVDRNSCKLSSSFIITQNMFCAGYDTKQEDACQGDSGGPHVTRFKDTYFVTGIVSWGEGCARKGKYGIYTKVTAFLKWIDRSMKTRGLPKAKSHAPEVITSSPLK

SEQ ID NO: 89 - DNA, 1386 bp, Artificial
  Recombinant
gccaattcctttcttgaagagatgaagaaaggacacctcgaaagagagtgcatggaagagacctgctcatacgaagaggcccgcgaggtctttgaggacagcgacaagacgaatgaattctggaataaatacaaagatggcgaccagtgtgagaccagtccttgccagaaccagggcaaatgtaaagacggcctcggggaatacacctgcacctgtttagaaggattcgaaggcaaaaactgtgaattattcacacggaagctctgcagcctggacaacggggactgtgaccagttctgccacgaggaacagaactctgtggtgtgctcctgcgcccgcgggtacaccctggctgacaacggcaaggcctgcattcccacagggccctacccctgtgggaaacagaccctggaacgcaggaagaggtcagtggcccaggccaccagcagcagcggggaggcccctgacagcatcacatggaagccatatgatgcagccgacctggaccccaccgagaaccccttcgacctgcttgacttcaaccagacgcagcctgagaggggcgacaacaacgccaccttcacccccaggatcgtgggaggccaggaatgcaaggacggggagtgtccctggcaggccctgctcatcaatgaggaaaacgagggtttctgtggtggaactattctgagcgagttctacatcctaacggcagcccactgtctctaccaagccaagagattcaaggtgagggtaggggaccggaacacggagcaggaggagggcggtgaggcggtgcacgaggtggaggtggtcatcaagcacaaccggttcacaaaggagacctatgacttcgacatcgccgtgctccggctcaagacccccatcaccttccgcatgaacgtggcgcctgcctgcctccccgagcgtgactgggccgagtccacgctgatgacgcagaagacggggattgtgagtggcttcgggcgcacccacgagaagggccggcagtccaccaggctcaagatgctggaggtgccctacgtggaccgcaacagctgcaagctgtccagcagcttcatcatcacccagaacatgttctgtgccggctacgacaccaagcaggaggatgcctgccagggggacagcgggggcccgcacgtcacccgcttcaaggacacctacttcgtgacaggcatcgtcagctggggagagggctgtgcccgtaaggggaagtacgggatctacaccaaggtcaccgccttcctcaagtggatcgacaggtccatgaaaaccaggggcttgcccaaggccaagagccatgccccggaggtcataacgtcctctccattaaaagaccaagtagatccgcggctcattgatgggaag

SEQ ID NO: 90 - protein, 462 aa, Artificial
  Recombinant
ANSFLEEMKKGHLERECMEETCSYEEAREVFEDSDKTNEFWNKYKDGDQCETSPCQNQGKCKDGLGEYTCTCLEGFEGKNCELFTRKLCSLDNGDCDQFCHEEQNSVVCSCARGYTLADNGKACIPTGPYPCGKQTLERRKRSVAQATSSSGEAPDSITWKPYDAADLDPTENPFDLLDFNQTQPERGDNNATFTPRIVGGQECKDGECPWQALLINEENEGFCGGTILSEFYILTAAHCLYQAKRFKVRVGDRNTEQEEGGEAVHEVEVVIKHNRFTKETYDFDIAVLRLKTPITFRMNVAPACLPERDWAESTLMTQKTGIVSGFGRTHEKGRQSTRLKMLEVPYVDRNSCKLSSSFIITQNMFCAGYDTKQEDACQGDSGGPHVTRFKDTYFVTGIVSWGEGCARKGKYGIYTKVTAFLKWIDRSMKTRGLPKAKSHAPEVITSSPLKDQVDPRLIDGK

SEQ ID NO: 91 - DNA, 1353 bp, Artificial
  Recombinant
gccaattcctttcttgaagagatgaagaaaggacacctcgaaagagagtgcatggaagagacctgctcatacgaagaggcccgcgaggtctttgaggacagcgacaagacgaatgaattctggaataaatacaaagatggcgaccagtgtgagaccagtccttgccagaaccagggcaaatgtaaagacggcctcggggaatacacctgcacctgtttagaaggattcgaaggcaaaaactgtgaattattcacacggaagctctgcagcctggacaacggggactgtgaccagttctgccacgaggaacagaactctgtggtgtgctcctgcgcccgcgggtacaccctggctgacaacggcaaggcctgcattcccacagggccctacccctgtgggaaacagaccctggaacgcaggaagaggtcagtggcccaggccaccagcagcagcggggaggcccctgacagcatcacatggaagccatatgatgcagccgacctggaccccaccgagaaccccttcgacctgcttgacttcaaccagacgcagcctgagaggggcgacaacaacgccaccttcacccccaggatcgtgggaggccaggaatgcaaggacggggagtgtccctggcaggccctgctcatcaatgaggaaaacgagggtttctgtggtggaactattctgagcgagttctacatcctaacggcagcccactgtctctaccaagccaagagattcaaggtgagggtaggggaccggaacacggagcaggaggagggcggtgaggcggtgcacgaggtggaggtggtcatcaagcacaaccggttcacaaaggagacctatgacttcgacatcgccgtgctccggctcaagacccccatcaccttccgcatgaacgtggcgcctgcctgcctccccgagcgtgactgggccgagtccacgctgatgacgcagaagacggggattgtgagtggcttcgggcgcacccacgagaagggccggcagtccaccaggctcaagatgctggaggtgccctacgtggaccgcaacagctgcaagctgtccagcagcttcatcatcacccagaacatgttctgtgccggctacgacaccaagcaggaggatgcctgccagggggacagcgggggcccgcacgtcacccgcttcaaggacacctacttcgtgacaggcatcgtcagctggggagagggctgtgcccgtaaggggaagtacgggatctacaccaaggtcaccgccttcctcaagtggatcgacaggtccatgaaaaccaggggcttgcccaaggccaagagccatgccccggaggtcataacgtcctctccattaaaa

SEQ ID NO: 92 - protein, 451 aa, Artificial
  Recombinant
ANSFLEEMKKGHLERECMEETCSYEEAREVFEDSDKTNEFWNKYKDGDQCETSPCQNQGKCKDGLGEYTCTCLEGFEGKNCELFTRKLCSLDNGDCDQFCHEEQNSVVCSCARGYTLADNGKACIPTGPYPCGKQTLERRKRSVAQATSSSGEAPDSITWKPYDAADLDPTENPFDLLDFNQTQPERGDNNATFTPRIVGGQECKDGECPWQALLINEENEGFCGGTILSEFYILTAAHCLYQAKRFKVRVGDRNTEQEEGGEAVHEVEVVIKHNRFTKETYDFDIAVLRLKTPITFRMNVAPACLPERDWAESTLMTQKTGIVSGFGRTHEKGRQSTRLKMLEVPYVDRNSCKLSSSFIITQNMFCAGYDTKQEDACQGDSGGPHVTRFKDTYFVTGIVSWGEGCARKGKYGIYTKVTAFLKWIDRSMKTRGLPKAKSHAPEVITSSPLK

SEQ ID NO: 93 - DNA, 1386 bp, Artificial
  Recombinant
gccaattcctttcttgaagagatgaagaaaggacacctcgaaagagagtgcatggaagagacctgctcatacgaagaggcccgcgaggtctttgaggacagcgacaagacgaatgaattctggaataaatacaaagatggcgaccagtgtgagaccagtccttgccagaaccagggcaaatgtaaagacggcctcggggaatacacctgcacctgtttagaaggattcgaaggcaaaaactgtgaattattcacacggaagctctgcagcctggacaacggggactgtgaccagttctgccacgaggaacagaactctgtggtgtgctcctgcgcccgcgggtacaccctggctgacaacggcaaggcctgcattcccacagggccctacccctgtgggaaacagaccctggaacgcaggaagaggtcagtggcccaggccaccagcagcagcggggaggcccctgacagcatcacatggaagccatatgatgcagccgacctggaccccaccgagaaccccttcgacctgcttgacttcaaccagacgcagcctgagaggggcgacaacaacgccaccttcaagcccaggatcgtgggaggccaggaatgcaaggacggggagtgtccctggcaggccctgctcatcaatgaggaaaacgagggtttctgtggtggaactattctgagcgagttctacatcctaacggcagcccactgtctctaccaagccaagagattcaaggtgagggtaggggaccggaacacggagcaggaggagggcggtgaggcggtgcacgaggtggaggtggtcatcaagcacaaccggttcacaaaggagacctatgacttcgacatcgccgtgctccggctcaagacccccatcaccttccgcatgaacgtggcgcctgcctgcctccccgagcgtgactgggccgagtccacgctgatgacgcagaagacggggattgtgagtggcttcgggcgcacccacgagaagggccggcagtccaccaggctcaagatgctggaggtgccctacgtggaccgcaacagctgcaagctgtccagcagcttcatcatcacccagaacatgttctgtgccggctacgacaccaagcaggaggatgcctgccagggggacagcgggggcccgcacgtcacccgcttcaaggacacctacttcgtgacaggcatcgtcagctggggagagggctgtgcccgtaaggggaagtacgggatctacaccaaggtcaccgccttcctcaagtggatcgacaggtccatgaaaaccaggggcttgcccaaggccaagagccatgccccggaggtcataacgtcctctccattaaaagaccaagtagatccgcggctcattgatgggaag

SEQ ID NO: 94 - protein, 462 aa, Artificial
  Recombinant
ANSFLEEMKKGHLERECMEETCSYEEAREVFEDSDKTNEFWNKYKDGDQCETSPCQNQGKCKDGLGEYTCTCLEGFEGKNCELFTRKLCSLDNGDCDQFCHEEQNSVVCSCARGYTLADNGKACIPTGPYPCGKQTLERRKRSVAQATSSSGEAPDSITWKPYDAADLDPTENPFDLLDFNQTQPERGDNNATFKPRIVGGQECKDGECPWQALLINEENEGFCGGTILSEFYILTAAHCLYQAKRFKVRVGDRNTEQEEGGEAVHEVEVVIKHNRFTKETYDFDIAVLRLKTPITFRMNVAPACLPERDWAESTLMTQKTGIVSGFGRTHEKGRQSTRLKMLEVPYVDRNSCKLSSSFIITQNMFCAGYDTKQEDACQGDSGGPHVTRFKDTYFVTGIVSWGEGCARKGKYGIYTKVTAFLKWIDRSMKTRGLPKAKSHAPEVITSSPLKDQVDPRLIDGK

SEQ ID NO: 95 - DNA, 1353 bp, Artificial
  Recombinant
gccaattcctttcttgaagagatgaagaaaggacacctcgaaagagagtgcatggaagagacctgctcatacgaagaggcccgcgaggtctttgaggacagcgacaagacgaatgaattctggaataaatacaaagatggcgaccagtgtgagaccagtccttgccagaaccagggcaaatgtaaagacggcctcggggaatacacctgcacctgtttagaaggattcgaaggcaaaaactgtgaattattcacacggaagctctgcagcctggacaacggggactgtgaccagttctgccacgaggaacagaactctgtggtgtgctcctgcgcccgcgggtacaccctggctgacaacggcaaggcctgcattcccacagggccctacccctgtgggaaacagaccctggaacgcaggaagaggtcagtggcccaggccaccagcagcagcggggaggcccctgacagcatcacatggaagccatatgatgcagccgacctggaccccaccgagaaccccttcgacctgcttgacttcaaccagacgcagcctgagaggggcgacaacaacgccaccttcaagcccaggatcgtgggaggccaggaatgcaaggacggggagtgtccctggcaggccctgctcatcaatgaggaaaacgagggtttctgtggtggaactattctgagcgagttctacatcctaacggcagcccactgtctctaccaagccaagagattcaaggtgagggtaggggaccggaacacggagcaggaggagggcggtgaggcggtgcacgaggtggaggtggtcatcaagcacaaccggttcacaaaggagacctatgacttcgacatcgccgtgctccggctcaagacccccatcaccttccgcatgaacgtggcgcctgcctgcctccccgagcgtgactgggccgagtccacgctgatgacgcagaagacggggattgtgagtggcttcgggcgcacccacgagaagggccggcagtccaccaggctcaagatgctggaggtgccctacgtggaccgcaacagctgcaagctgtccagcagcttcatcatcacccagaacatgttctgtgccggctacgacaccaagcaggaggatgcctgccagggggacagcgggggcccgcacgtcacccgcttcaaggacacctacttcgtgacaggcatcgtcagctggggagagggctgtgcccgtaaggggaagtacgggatctacaccaaggtcaccgccttcctcaagtggatcgacaggtccatgaaaaccaggggcttgcccaaggccaagagccatgccccggaggtcataacgtcctctccattaaaa

SEQ ID NO: 96 - protein, 451 aa, Artificial
  Recombinant
ANSFLEEMKKGHLERECMEETCSYEEAREVFEDSDKTNEFWNKYKDGDQCETSPCQNQGKCKDGLGEYTCTCLEGFEGKNCELFTRKLCSLDNGDCDQFCHEEQNSVVCSCARGYTLADNGKACIPTGPYPCGKQTLERRKRSVAQATSSSGEAPDSITWKPYDAADLDPTENPFDLLDFNQTQPERGDNNATFKPRIVGGQECKDGECPWQALLINEENEGFCGGTILSEFYILTAAHCLYQAKRFKVRVGDRNTEQEEGGEAVHEVEVVIKHNRFTKETYDFDIAVLRLKTPITFRMNVAPACLPERDWAESTLMTQKTGIVSGFGRTHEKGRQSTRLKMLEVPYVDRNSCKLSSSFIITQNMFCAGYDTKQEDACQGDSGGPHVTRFKDTYFVTGIVSWGEGCARKGKYGIYTKVTAFLKWIDRSMKTRGLPKAKSHAPEVITSSPLK

SEQ ID NO: 97 - DNA, 1386 bp, Artificial
  Recombinant
gccaattcctttcttgaagagatgaagaaaggacacctcgaaagagagtgcatggaagagacctgctcatacgaagaggcccgcgaggtctttgaggacagcgacaagacgaatgaattctggaataaatacaaagatggcgaccagtgtgagaccagtccttgccagaaccagggcaaatgtaaagacggcctcggggaatacacctgcacctgtttagaaggattcgaaggcaaaaactgtgaattattcacacggaagctctgcagcctggacaacggggactgtgaccagttctgccacgaggaacagaactctgtggtgtgctcctgcgcccgcgggtacaccctggctgacaacggcaaggcctgcattcccacagggccctacccctgtgggaaacagaccctggaacgcaggaagaggtcagtggcccaggccaccagcagcagcggggaggcccctgacagcatcacatggaagccatatgatgcagccgacctggaccccaccgagaaccccttcgacctgcttgacttcaaccagacgcagcctgagaggggcgacaacaacgccaccatgaagcccaggatcgtgggaggccaggaatgcaaggacggggagtgtccctggcaggccctgctcatcaatgaggaaaacgagggtttctgtggtggaactattctgagcgagttctacatcctaacggcagcccactgtctctaccaagccaagagattcaaggtgagggtaggggaccggaacacggagcaggaggagggcggtgaggcggtgcacgaggtggaggtggtcatcaagcacaaccggttcacaaaggagacctatgacttcgacatcgccgtgctccggctcaagacccccatcaccttccgcatgaacgtggcgcctgcctgcctccccgagcgtgactgggccgagtccacgctgatgacgcagaagacggggattgtgagtggcttcgggcgcacccacgagaagggccggcagtccaccaggctcaagatgctggaggtgccctacgtggaccgcaacagctgcaagctgtccagcagcttcatcatcacccagaacatgttctgtgccggctacgacaccaagcaggaggatgcctgccagggggacagcgggggcccgcacgtcacccgcttcaaggacacctacttcgtgacaggcatcgtcagctggggagagggctgtgcccgtaaggggaagtacgggatctacaccaaggtcaccgccttcctcaagtggatcgacaggtccatgaaaaccaggggcttgcccaaggccaagagccatgccccggaggtcataacgtcctctccattaaaagaccaagtagatccgcggctcattgatgggaag

SEQ ID NO: 98 - protein, 462 aa, Artificial
  Recombinant
ANSFLEEMKKGHLERECMEETCSYEEAREVFEDSDKTNEFWNKYKDGDQCETSPCQNQGKCKDGLGEYTCTCLEGFEGKNCELFTRKLCSLDNGDCDQFCHEEQNSVVCSCARGYTLADNGKACIPTGPYPCGKQTLERRKRSVAQATSSSGEAPDSITWKPYDAADLDPTENPFDLLDFNQTQPERGDNNATMKPRIVGGQECKDGECPWQALLINEENEGFCGGTILSEFYILTAAHCLYQAKRFKVRVGDRNTEQEEGGEAVHEVEVVIKHNRFTKETYDFDIAVLRLKTPITFRMNVAPACLPERDWAESTLMTQKTGIVSGFGRTHEKGRQSTRLKMLEVPYVDRNSCKLSSSFIITQNMFCAGYDTKQEDACQGDSGGPHVTRFKDTYFVTGIVSWGEGCARKGKYGIYTKVTAFLKWIDRSMKTRGLPKAKSHAPEVITSSPLKDQVDPRLIDGK

SEQ ID NO: 99 - DNA, 1353 bp, Artificial
  Recombinant
gccaattcctttcttgaagagatgaagaaaggacacctcgaaagagagtgcatggaagagacctgctcatacgaagaggcccgcgaggtctttgaggacagcgacaagacgaatgaattctggaataaatacaaagatggcgaccagtgtgagaccagtccttgccagaaccagggcaaatgtaaagacggcctcggggaatacacctgcacctgtttagaaggattcgaaggcaaaaactgtgaattattcacacggaagctctgcagcctggacaacggggactgtgaccagttctgccacgaggaacagaactctgtggtgtgctcctgcgcccgcgggtacaccctggctgacaacggcaaggcctgcattcccacagggccctacccctgtgggaaacagaccctggaacgcaggaagaggtcagtggcccaggccaccagcagcagcggggaggcccctgacagcatcacatggaagccatatgatgcagccgacctggaccccaccgagaaccccttcgacctgcttgacttcaaccagacgcagcctgagaggggcgacaacaacgccaccatgaagcccaggatcgtgggaggccaggaatgcaaggacggggagtgtccctggcaggccctgctcatcaatgaggaaaacgagggtttctgtggtggaactattctgagcgagttctacatcctaacggcagcccactgtctctaccaagccaagagattcaaggtgagggtaggggaccggaacacggagcaggaggagggcggtgaggcggtgcacgaggtggaggtggtcatcaagcacaaccggttcacaaaggagacctatgacttcgacatcgccgtgctccggctcaagacccccatcaccttccgcatgaacgtggcgcctgcctgcctccccgagcgtgactgggccgagtccacgctgatgacgcagaagacggggattgtgagtggcttcgggcgcacccacgagaagggccggcagtccaccaggctcaagatgctggaggtgccctacgtggaccgcaacagctgcaagctgtccagcagcttcatcatcacccagaacatgttctgtgccggctacgacaccaagcaggaggatgcctgccagggggacagcgggggcccgcacgtcacccgcttcaaggacacctacttcgtgacaggcatcgtcagctggggagagggctgtgcccgtaaggggaagtacgggatctacaccaaggtcaccgccttcctcaagtggatcgacaggtccatgaaaaccaggggcttgcccaaggccaagagccatgccccggaggtcataacgtcctctccattaaaa

SEQ ID NO: 100 - protein, 451 aa, Artificial
  Recombinant
ANSFLEEMKKGHLERECMEETCSYEEAREVFEDSDKTNEFWNKYKDGDQCETSPCQNQGKCKDGLGEYTCTCLEGFEGKNCELFTRKLCSLDNGDCDQFCHEEQNSVVCSCARGYTLADNGKACIPTGPYPCGKQTLERRKRSVAQATSSSGEAPDSITWKPYDAADLDPTENPFDLLDFNQTQPERGDNNATMKPRIVGGQECKDGECPWQALLINEENEGFCGGTILSEFYILTAAHCLYQAKRFKVRVGDRNTEQEEGGEAVHEVEVVIKHNRFTKETYDFDIAVLRLKTPITFRMNVAPACLPERDWAESTLMTQKTGIVSGFGRTHEKGRQSTRLKMLEVPYVDRNSCKLSSSFIITQNMFCAGYDTKQEDACQGDSGGPHVTRFKDTYFVTGIVSWGEGCARKGKYGIYTKVTAFLKWIDRSMKTRGLPKAKSHAPEVITSSPLK

SEQ ID NO: 101 - DNA, 1386 bp, Artificial
  Recombinant
gccaattcctttcttgaagagatgaagaaaggacacctcgaaagagagtgcatggaagagacctgctcatacgaagaggcccgcgaggtctttgaggacagcgacaagacgaatgaattctggaataaatacaaagatggcgaccagtgtgagaccagtccttgccagaaccagggcaaatgtaaagacggcctcggggaatacacctgcacctgtttagaaggattcgaaggcaaaaactgtgaattattcacacggaagctctgcagcctggacaacggggactgtgaccagttctgccacgaggaacagaactctgtggtgtgctcctgcgcccgcgggtacaccctggctgacaacggcaaggcctgcattcccacagggccctacccctgtgggaaacagaccctggaacgcaggaagaggtcagtggcccaggccaccagcagcagcggggaggcccctgacagcatcacatggaagccatatgatgcagccgacctggaccccaccgagaaccccttcgacctgcttgacttcaaccagacgcagcctgagaggggcgacaacaacgccacctggcagcccaggatcgtgggaggccaggaatgcaaggacggggagtgtccctggcaggccctgctcatcaatgaggaaaacgagggtttctgtggtggaactattctgagcgagttctacatcctaacggcagcccactgtctctaccaagccaagagattcaaggtgagggtaggggaccggaacacggagcaggaggagggcggtgaggcggtgcacgaggtggaggtggtcatcaagcacaaccggttcacaaaggagacctatgacttcgacatcgccgtgctccggctcaagacccccatcaccttccgcatgaacgtggcgcctgcctgcctccccgagcgtgactgggccgagtccacgctgatgacgcagaagacggggattgtgagtggcttcgggcgcacccacgagaagggccggcagtccaccaggctcaagatgctggaggtgccctacgtggaccgcaacagctgcaagctgtccagcagcttcatcatcacccagaacatgttctgtgccggctacgacaccaagcaggaggatgcctgccagggggacagcgggggcccgcacgtcacccgcttcaaggacacctacttcgtgacaggcatcgtcagctggggagagggctgtgcccgtaaggggaagtacgggatctacaccaaggtcaccgccttcctcaagtggatcgacaggtccatgaaaaccaggggcttgcccaaggccaagagccatgccccggaggtcataacgtcctctccattaaaagaccaagtagatccgcggctcattgatgggaag

SEQ ID NO: 102 - protein, 462 aa, Artificial
  Recombinant
ANSFLEEMKKGHLERECMEETCSYEEAREVFEDSDKTNEFWNKYKDGDQCETSPCQNQGKCKDGLGEYTCTCLEGFEGKNCELFTRKLCSLDNGDCDQFCHEEQNSVVCSCARGYTLADNGKACIPTGPYPCGKQTLERRKRSVAQATSSSGEAPDSITWKPYDAADLDPTENPFDLLDFNQTQPERGDNNATWQPRIVGGQECKDGECPWQALLINEENEGFCGGTILSEFYILTAAHCLYQAKRFKVRVGDRNTEQEEGGEAVHEVEVVIKHNRFTKETYDFDIAVLRLKTPITFRMNVAPACLPERDWAESTLMTQKTGIVSGFGRTHEKGRQSTRLKMLEVPYVDRNSCKLSSSFIITQNMFCAGYDTKQEDACQGDSGGPHVTRFKDTYFVTGIVSWGEGCARKGKYGIYTKVTAFLKWIDRSMKTRGLPKAKSHAPEVITSSPLKDQVDPRLIDGK

SEQ ID NO: 103 - DNA, 1353 bp, Artificial
  Recombinant
gccaattcctttcttgaagagatgaagaaaggacacctcgaaagagagtgcatggaagagacctgctcatacgaagaggcccgcgaggtctttgaggacagcgacaagacgaatgaattctggaataaatacaaagatggcgaccagtgtgagaccagtccttgccagaaccagggcaaatgtaaagacggcctcggggaatacacctgcacctgtttagaaggattcgaaggcaaaaactgtgaattattcacacggaagctctgcagcctggacaacggggactgtgaccagttctgccacgaggaacagaactctgtggtgtgctcctgcgcccgcgggtacaccctggctgacaacggcaaggcctgcattcccacagggccctacccctgtgggaaacagaccctggaacgcaggaagaggtcagtggcccaggccaccagcagcagcggggaggcccctgacagcatcacatggaagccatatgatgcagccgacctggaccccaccgagaaccccttcgacctgcttgacttcaaccagacgcagcctgagaggggcgacaacaacgccacctggcagcccaggatcgtgggaggccaggaatgcaaggacggggagtgtccctggcaggccctgctcatcaatgaggaaaacgagggtttctgtggtggaactattctgagcgagttctacatcctaacggcagcccactgtctctaccaagccaagagattcaaggtgagggtaggggaccggaacacggagcaggaggagggcggtgaggcggtgcacgaggtggaggtggtcatcaagcacaaccggttcacaaaggagacctatgacttcgacatcgccgtgctccggctcaagacccccatcaccttccgcatgaacgtggcgcctgcctgcctccccgagcgtgactgggccgagtccacgctgatgacgcagaagacggggattgtgagtggcttcgggcgcacccacgagaagggccggcagtccaccaggctcaagatgctggaggtgccctacgtggaccgcaacagctgcaagctgtccagcagcttcatcatcacccagaacatgttctgtgccggctacgacaccaagcaggaggatgcctgccagggggacagcgggggcccgcacgtcacccgcttcaaggacacctacttcgtgacaggcatcgtcagctggggagagggctgtgcccgtaaggggaagtacgggatctacaccaaggtcaccgccttcctcaagtggatcgacaggtccatgaaaaccaggggcttgcccaaggccaagagccatgccccggaggtcataacgtcctctccattaaaa

SEQ ID NO: 104 - protein, 451 aa, Artificial
  Recombinant
ANSFLEEMKKGHLERECMEETCSYEEAREVFEDSDKTNEFWNKYKDGDQCETSPCQNQGKCKDGLGEYTCTCLEGFEGKNCELFTRKLCSLDNGDCDQFCHEEQNSVVCSCARGYTLADNGKACIPTGPYPCGKQTLERRKRSVAQATSSSGEAPDSITWKPYDAADLDPTENPFDLLDFNQTQPERGDNNATWQPRIVGGQECKDGECPWQALLINEENEGFCGGTILSEFYILTAAHCLYQAKRFKVRVGDRNTEQEEGGEAVHEVEVVIKHNRFTKETYDFDIAVLRLKTPITFRMNVAPACLPERDWAESTLMTQKTGIVSGFGRTHEKGRQSTRLKMLEVPYVDRNSCKLSSSFIITQNMFCAGYDTKQEDACQGDSGGPHVTRFKDTYFVTGIVSWGEGCARKGKYGIYTKVTAFLKWIDRSMKTRGLPKAKSHAPEVITSSPLK

SEQ ID NO: 105 - DNA, 1377 bp, Artificial
  Recombinant
gccaattcctttcttgaagagatgaagaaaggacacctcgaaagagagtgcatggaagagacctgctcatacgaagaggcccgcgaggtctttgaggacagcgacaagacgaatgaattctggaataaatacaaagatggcgaccagtgtgagaccagtccttgccagaaccagggcaaatgtaaagacggcctcggggaatacacctgcacctgtttagaaggattcgaaggcaaaaactgtgaattattcacacggaagctctgcagcctggacaacggggactgtgaccagttctgccacgaggaacagaactctgtggtgtgctcctgcgcccgcgggtacaccctggctgacaacggcaaggcctgcattcccacagggccctacccctgtgggaaacagaccctggaacgcaggaagaggtcagtggcccaggccaccagcagcagcggggaggcccctgacagcatcacatggaagccatatgatgcagccgacctggaccccaccgagaaccccttcgacctgcttgacttcaaccagacgcagcctgagaggggcgacaacctgacccccaggatcgtgggaggccaggaatgcaaggacggggagtgtccctggcaggccctgctcatcaatgaggaaaacgagggtttctgtggtggaactattctgagcgagttctacatcctaacggcagcccactgtctctaccaagccaagagattcaaggtgagggtaggggaccggaacacggagcaggaggagggcggtgaggcggtgcacgaggtggaggtggtcatcaagcacaaccggttcacaaaggagacctatgacttcgacatcgccgtgctccggctcaagacccccatcaccttccgcatgaacgtggcgcctgcctgcctccccgagcgtgactgggccgagtccacgctgatgacgcagaagacggggattgtgagtggcttcgggcgcacccacgagaagggccggcagtccaccaggctcaagatgctggaggtgccctacgtggaccgcaacagctgcaagctgtccagcagcttcatcatcacccagaacatgttctgtgccggctacgacaccaagcaggaggatgcctgccagggggacagcgggggcccgcacgtcacccgcttcaaggacacctacttcgtgacaggcatcgtcagctggggagagggctgtgcccgtaaggggaagtacgggatctacaccaaggtcaccgccttcctcaagtggatcgacaggtccatgaaaaccaggggcttgcccaaggccaagagccatgccccggaggtcataacgtcctctccattaaaagaccaagtagatccgcggctcattgatgggaag

SEQ ID NO: 106 - protein, 459 aa, Artificial
  Recombinant
ANSFLEEMKKGHLERECMEETCSYEEAREVFEDSDKTNEFWNKYKDGDQCETSPCQNQGKCKDGLGEYTCTCLEGFEGKNCELFTRKLCSLDNGDCDQFCHEEQNSVVCSCARGYTLADNGKACIPTGPYPCGKQTLERRKRSVAQATSSSGEAPDSITWKPYDAADLDPTENPFDLLDFNQTQPERGDNLTPRIVGGQECKDGECPWQALLINEENEGFCGGTILSEFYILTAAHCLYQAKRFKVRVGDRNTEQEEGGEAVHEVEVVIKHNRFTKETYDFDIAVLRLKTPITFRMNVAPACLPERDWAESTLMTQKTGIVSGFGRTHEKGRQSTRLKMLEVPYVDRNSCKLSSSFIITQNMFCAGYDTKQEDACQGDSGGPHVTRFKDTYFVTGIVSWGEGCARKGKYGIYTKVTAFLKWIDRSMKTRGLPKAKSHAPEVITSSPLKDQVDPRLIDGK

SEQ ID NO: 107 - DNA, 1344 bp, Artificial
  Recombinant
gccaattcctttcttgaagagatgaagaaaggacacctcgaaagagagtgcatggaagagacctgctcatacgaagaggcccgcgaggtctttgaggacagcgacaagacgaatgaattctggaataaatacaaagatggcgaccagtgtgagaccagtccttgccagaaccagggcaaatgtaaagacggcctcggggaatacacctgcacctgtttagaaggattcgaaggcaaaaactgtgaattattcacacggaagctctgcagcctggacaacggggactgtgaccagttctgccacgaggaacagaactctgtggtgtgctcctgcgcccgcgggtacaccctggctgacaacggcaaggcctgcattcccacagggccctacccctgtgggaaacagaccctggaacgcaggaagaggtcagtggcccaggccaccagcagcagcggggaggcccctgacagcatcacatggaagccatatgatgcagccgacctggaccccaccgagaaccccttcgacctgcttgacttcaaccagacgcagcctgagaggggcgacaacctgacccccaggatcgtgggaggccaggaatgcaaggacggggagtgtccctggcaggccctgctcatcaatgaggaaaacgagggtttctgtggtggaactattctgagcgagttctacatcctaacggcagcccactgtctctaccaagccaagagattcaaggtgagggtaggggaccggaacacggagcaggaggagggcggtgaggcggtgcacgaggtggaggtggtcatcaagcacaaccggttcacaaaggagacctatgacttcgacatcgccgtgctccggctcaagacccccatcaccttccgcatgaacgtggcgcctgcctgcctccccgagcgtgactgggccgagtccacgctgatgacgcagaagacggggattgtgagtggcttcgggcgcacccacgagaagggccggcagtccaccaggctcaagatgctggaggtgccctacgtggaccgcaacagctgcaagctgtccagcagcttcatcatcacccagaacatgttctgtgccggctacgacaccaagcaggaggatgcctgccagggggacagcgggggcccgcacgtcacccgcttcaaggacacctacttcgtgacaggcatcgtcagctggggagagggctgtgcccgtaaggggaagtacgggatctacaccaaggtcaccgccttcctcaagtggatcgacaggtccatgaaaaccaggggcttgcccaaggccaagagccatgccccggaggtcataacgtcctctccattaaaa

SEQ ID NO: 108 - protein, 448 aa, Artificial
  Recombinant
ANSFLEEMKKGHLERECMEETCSYEEAREVFEDSDKTNEFWNKYKDGDQCETSPCQNQGKCKDGLGEYTCTCLEGFEGKNCELFTRKLCSLDNGDCDQFCHEEQNSVVCSCARGYTLADNGKACIPTGPYPCGKQTLERRKRSVAQATSSSGEAPDSITWKPYDAADLDPTENPFDLLDFNQTQPERGDNLTPRIVGGQECKDGECPWQALLINEENEGFCGGTILSEFYILTAAHCLYQAKRFKVRVGDRNTEQEEGGEAVHEVEVVIKHNRFTKETYDFDIAVLRLKTPITFRMNVAPACLPERDWAESTLMTQKTGIVSGFGRTHEKGRQSTRLKMLEVPYVDRNSCKLSSSFIITQNMFCAGYDTKQEDACQGDSGGPHVTRFKDTYFVTGIVSWGEGCARKGKYGIYTKVTAFLKWIDRSMKTRGLPKAKSHAPEVITSSPLK

SEQ ID NO: 109 - DNA, 1377 bp, Artificial
  Recombinant
gccaattcctttcttgaagagatgaagaaaggacacctcgaaagagagtgcatggaagagacctgctcatacgaagaggcccgcgaggtctttgaggacagcgacaagacgaatgaattctggaataaatacaaagatggcgaccagtgtgagaccagtccttgccagaaccagggcaaatgtaaagacggcctcggggaatacacctgcacctgtttagaaggattcgaaggcaaaaactgtgaattattcacacggaagctctgcagcctggacaacggggactgtgaccagttctgccacgaggaacagaactctgtggtgtgctcctgcgcccgcgggtacaccctggctgacaacggcaaggcctgcattcccacagggccctacccctgtgggaaacagaccctggaacgcaggaagaggtcagtggcccaggccaccagcagcagcggggaggcccctgacagcatcacatggaagccatatgatgcagccgacctggaccccaccgagaaccccttcgacctgcttgacttcaaccagacgcagcctgagaggggcgacaacatgacccccaggatcgtgggaggccaggaatgcaaggacggggagtgtccctggcaggccctgctcatcaatgaggaaaacgagggtttctgtggtggaactattctgagcgagttctacatcctaacggcagcccactgtctctaccaagccaagagattcaaggtgagggtaggggaccggaacacggagcaggaggagggcggtgaggcggtgcacgaggtggaggtggtcatcaagcacaaccggttcacaaaggagacctatgacttcgacatcgccgtgctccggctcaagacccccatcaccttccgcatgaacgtggcgcctgcctgcctccccgagcgtgactgggccgagtccacgctgatgacgcagaagacggggattgtgagtggcttcgggcgcacccacgagaagggccggcagtccaccaggctcaagatgctggaggtgccctacgtggaccgcaacagctgcaagctgtccagcagcttcatcatcacccagaacatgttctgtgccggctacgacaccaagcaggaggatgcctgccagggggacagcgggggcccgcacgtcacccgcttcaaggacacctacttcgtgacaggcatcgtcagctggggagagggctgtgcccgtaaggggaagtacgggatctacaccaaggtcaccgccttcctcaagtggatcgacaggtccatgaaaaccaggggcttgcccaaggccaagagccatgccccggaggtcataacgtcctctccattaaaagaccaagtagatccgcggctcattgatgggaag

SEQ ID NO: 110 - protein, 459 aa, Artificial
  Recombinant
ANSFLEEMKKGHLERECMEETCSYEEAREVFEDSDKTNEFWNKYKDGDQCETSPCQNQGKCKDGLGEYTCTCLEGFEGKNCELFTRKLCSLDNGDCDQFCHEEQNSVVCSCARGYTLADNGKACIPTGPYPCGKQTLERRKRSVAQATSSSGEAPDSITWKPYDAADLDPTENPFDLLDFNQTQPERGDNMTPRIVGGQECKDGECPWQALLINEENEGFCGGTILSEFYILTAAHCLYQAKRFKVRVGDRNTEQEEGGEAVHEVEVVIKHNRFTKETYDFDIAVLRLKTPITFRMNVAPACLPERDWAESTLMTQKTGIVSGFGRTHEKGRQSTRLKMLEVPYVDRNSCKLSSSFIITQNMFCAGYDTKQEDACQGDSGGPHVTRFKDTYFVTGIVSWGEGCARKGKYGIYTKVTAFLKWIDRSMKTRGLPKAKSHAPEVITSSPLKDQVDPRLIDGK

SEQ ID NO: 111 - DNA, 1344 bp, Artificial
  Recombinant
gccaattcctttcttgaagagatgaagaaaggacacctcgaaagagagtgcatggaagagacctgctcatacgaagaggcccgcgaggtctttgaggacagcgacaagacgaatgaattctggaataaatacaaagatggcgaccagtgtgagaccagtccttgccagaaccagggcaaatgtaaagacggcctcggggaatacacctgcacctgtttagaaggattcgaaggcaaaaactgtgaattattcacacggaagctctgcagcctggacaacggggactgtgaccagttctgccacgaggaacagaactctgtggtgtgctcctgcgcccgcgggtacaccctggctgacaacggcaaggcctgcattcccacagggccctacccctgtgggaaacagaccctggaacgcaggaagaggtcagtggcccaggccaccagcagcagcggggaggcccctgacagcatcacatggaagccatatgatgcagccgacctggaccccaccgagaaccccttcgacctgcttgacttcaaccagacgcagcctgagaggggcgacaacatgacccccaggatcgtgggaggccaggaatgcaaggacggggagtgtccctggcaggccctgctcatcaatgaggaaaacgagggtttctgtggtggaactattctgagcgagttctacatcctaacggcagcccactgtctctaccaagccaagagattcaaggtgagggtaggggaccggaacacggagcaggaggagggcggtgaggcggtgcacgaggtggaggtggtcatcaagcacaaccggttcacaaaggagacctatgacttcgacatcgccgtgctccggctcaagacccccatcaccttccgcatgaacgtggcgcctgcctgcctccccgagcgtgactgggccgagtccacgctgatgacgcagaagacggggattgtgagtggcttcgggcgcacccacgagaagggccggcagtccaccaggctcaagatgctggaggtgccctacgtggaccgcaacagctgcaagctgtccagcagcttcatcatcacccagaacatgttctgtgccggctacgacaccaagcaggaggatgcctgccagggggacagcgggggcccgcacgtcacccgcttcaaggacacctacttcgtgacaggcatcgtcagctggggagagggctgtgcccgtaaggggaagtacgggatctacaccaaggtcaccgccttcctcaagtggatcgacaggtccatgaaaaccaggggcttgcccaaggccaagagccatgccccggaggtcataacgtcctctccattaaaa

SEQ ID NO: 112 - protein, 448 aa, Artificial
  Recombinant
ANSFLEEMKKGHLERECMEETCSYEEAREVFEDSDKTNEFWNKYKDGDQCETSPCQNQGKCKDGLGEYTCTCLEGFEGKNCELFTRKLCSLDNGDCDQFCHEEQNSVVCSCARGYTLADNGKACIPTGPYPCGKQTLERRKRSVAQATSSSGEAPDSITWKPYDAADLDPTENPFDLLDFNQTQPERGDNMTPRIVGGQECKDGECPWQALLINEENEGFCGGTILSEFYILTAAHCLYQAKRFKVRVGDRNTEQEEGGEAVHEVEVVIKHNRFTKETYDFDIAVLRLKTPITFRMNVAPACLPERDWAESTLMTQKTGIVSGFGRTHEKGRQSTRLKMLEVPYVDRNSCKLSSSFIITQNMFCAGYDTKQEDACQGDSGGPHVTRFKDTYFVTGIVSWGEGCARKGKYGIYTKVTAFLKWIDRSMKTRGLPKAKSHAPEVITSSPLK

SEQ ID NO: 113 - DNA, 1377 bp, Artificial
  Recombinant
gccaattcctttcttgaagagatgaagaaaggacacctcgaaagagagtgcatggaagagacctgctcatacgaagaggcccgcgaggtctttgaggacagcgacaagacgaatgaattctggaataaatacaaagatggcgaccagtgtgagaccagtccttgccagaaccagggcaaatgtaaagacggcctcggggaatacacctgcacctgtttagaaggattcgaaggcaaaaactgtgaattattcacacggaagctctgcagcctggacaacggggactgtgaccagttctgccacgaggaacagaactctgtggtgtgctcctgcgcccgcgggtacaccctggctgacaacggcaaggcctgcattcccacagggccctacccctgtgggaaacagaccctggaacgcaggaagaggtcagtggcccaggccaccagcagcagcggggaggcccctgacagcatcacatggaagccatatgatgcagccgacctggaccccaccgagaaccccttcgacctgcttgacttcaaccagacgcagcctgagaggggcgacaacatcacccccaggatcgtgggaggccaggaatgcaaggacggggagtgtccctggcaggccctgctcatcaatgaggaaaacgagggtttctgtggtggaactattctgagcgagttctacatcctaacggcagcccactgtctctaccaagccaagagattcaaggtgagggtaggggaccggaacacggagcaggaggagggcggtgaggcggtgcacgaggtggaggtggtcatcaagcacaaccggttcacaaaggagacctatgacttcgacatcgccgtgctccggctcaagacccccatcaccttccgcatgaacgtggcgcctgcctgcctccccgagcgtgactgggccgagtccacgctgatgacgcagaagacggggattgtgagtggcttcgggcgcacccacgagaagggccggcagtccaccaggctcaagatgctggaggtgccctacgtggaccgcaacagctgcaagctgtccagcagcttcatcatcacccagaacatgttctgtgccggctacgacaccaagcaggaggatgcctgccagggggacagcgggggcccgcacgtcacccgcttcaaggacacctacttcgtgacaggcatcgtcagctggggagagggctgtgcccgtaaggggaagtacgggatctacaccaaggtcaccgccttcctcaagtggatcgacaggtccatgaaaaccaggggcttgcccaaggccaagagccatgccccggaggtcataacgtcctctccattaaaagaccaagtagatccgcggctcattgatgggaag

SEQ ID NO: 114 - protein, 459 aa, Artificial
  Recombinant
ANSFLEEMKKGHLERECMEETCSYEEAREVFEDSDKTNEFWNKYKDGDQCETSPCQNQGKCKDGLGEYTCTCLEGFEGKNCELFTRKLCSLDNGDCDQFCHEEQNSVVCSCARGYTLADNGKACIPTGPYPCGKQTLERRKRSVAQATSSSGEAPDSITWKPYDAADLDPTENPFDLLDFNQTQPERGDNITPRIVGGQECKDGECPWQALLINEENEGFCGGTILSEFYILTAAHCLYQAKRFKVRVGDRNTEQEEGGEAVHEVEVVIKHNRFTKETYDFDIAVLRLKTPITFRMNVAPACLPERDWAESTLMTQKTGIVSGFGRTHEKGRQSTRLKMLEVPYVDRNSCKLSSSFIITQNMFCAGYDTKQEDACQGDSGGPHVTRFKDTYFVTGIVSWGEGCARKGKYGIYTKVTAFLKWIDRSMKTRGLPKAKSHAPEVITSSPLKDQVDPRLIDGK

SEQ ID NO: 115 - DNA, 1344 bp, Artificial
  Recombinant
gccaattcctttcttgaagagatgaagaaaggacacctcgaaagagagtgcatggaagagacctgctcatacgaagaggcccgcgaggtctttgaggacagcgacaagacgaatgaattctggaataaatacaaagatggcgaccagtgtgagaccagtccttgccagaaccagggcaaatgtaaagacggcctcggggaatacacctgcacctgtttagaaggattcgaaggcaaaaactgtgaattattcacacggaagctctgcagcctggacaacggggactgtgaccagttctgccacgaggaacagaactctgtggtgtgctcctgcgcccgcgggtacaccctggctgacaacggcaaggcctgcattcccacagggccctacccctgtgggaaacagaccctggaacgcaggaagaggtcagtggcccaggccaccagcagcagcggggaggcccctgacagcatcacatggaagccatatgatgcagccgacctggaccccaccgagaaccccttcgacctgcttgacttcaaccagacgcagcctgagaggggcgacaacatcacccccaggatcgtgggaggccaggaatgcaaggacggggagtgtccctggcaggccctgctcatcaatgaggaaaacgagggtttctgtggtggaactattctgagcgagttctacatcctaacggcagcccactgtctctaccaagccaagagattcaaggtgagggtaggggaccggaacacggagcaggaggagggcggtgaggcggtgcacgaggtggaggtggtcatcaagcacaaccggttcacaaaggagacctatgacttcgacatcgccgtgctccggctcaagacccccatcaccttccgcatgaacgtggcgcctgcctgcctccccgagcgtgactgggccgagtccacgctgatgacgcagaagacggggattgtgagtggcttcgggcgcacccacgagaagggccggcagtccaccaggctcaagatgctggaggtgccctacgtggaccgcaacagctgcaagctgtccagcagcttcatcatcacccagaacatgttctgtgccggctacgacaccaagcaggaggatgcctgccagggggacagcgggggcccgcacgtcacccgcttcaaggacacctacttcgtgacaggcatcgtcagctggggagagggctgtgcccgtaaggggaagtacgggatctacaccaaggtcaccgccttcctcaagtggatcgacaggtccatgaaaaccaggggcttgcccaaggccaagagccatgccccggaggtcataacgtcctctccattaaaa

SEQ ID NO: 116 - protein, 448 aa, Artificial
  Recombinant
ANSFLEEMKKGHLERECMEETCSYEEAREVFEDSDKTNEFWNKYKDGDQCETSPCQNQGKCKDGLGEYTCTCLEGFEGKNCELFTRKLCSLDNGDCDQFCHEEQNSVVCSCARGYTLADNGKACIPTGPYPCGKQTLERRKRSVAQATSSSGEAPDSITWKPYDAADLDPTENPFDLLDFNQTQPERGDNITPRIVGGQECKDGECPWQALLINEENEGFCGGTILSEFYILTAAHCLYQAKRFKVRVGDRNTEQEEGGEAVHEVEVVIKHNRFTKETYDFDIAVLRLKTPITFRMNVAPACLPERDWAESTLMTQKTGIVSGFGRTHEKGRQSTRLKMLEVPYVDRNSCKLSSSFIITQNMFCAGYDTKQEDACQGDSGGPHVTRFKDTYFVTGIVSWGEGCARKGKYGIYTKVTAFLKWIDRSMKTRGLPKAKSHAPEVITSSPLK

SEQ ID NO: 117 - DNA, 1377 bp, Artificial
  Recombinant
gccaattcctttcttgaagagatgaagaaaggacacctcgaaagagagtgcatggaagagacctgctcatacgaagaggcccgcgaggtctttgaggacagcgacaagacgaatgaattctggaataaatacaaagatggcgaccagtgtgagaccagtccttgccagaaccagggcaaatgtaaagacggcctcggggaatacacctgcacctgtttagaaggattcgaaggcaaaaactgtgaattattcacacggaagctctgcagcctggacaacggggactgtgaccagttctgccacgaggaacagaactctgtggtgtgctcctgcgcccgcgggtacaccctggctgacaacggcaaggcctgcattcccacagggccctacccctgtgggaaacagaccctggaacgcaggaagaggtcagtggcccaggccaccagcagcagcggggaggcccctgacagcatcacatggaagccatatgatgcagccgacctggaccccaccgagaaccccttcgacctgcttgacttcaaccagacgcagcctgagaggggcgacaacttcacccccaggatcgtgggaggccaggaatgcaaggacggggagtgtccctggcaggccctgctcatcaatgaggaaaacgagggtttctgtggtggaactattctgagcgagttctacatcctaacggcagcccactgtctctaccaagccaagagattcaaggtgagggtaggggaccggaacacggagcaggaggagggcggtgaggcggtgcacgaggtggaggtggtcatcaagcacaaccggttcacaaaggagacctatgacttcgacatcgccgtgctccggctcaagacccccatcaccttccgcatgaacgtggcgcctgcctgcctccccgagcgtgactgggccgagtccacgctgatgacgcagaagacggggattgtgagtggcttcgggcgcacccacgagaagggccggcagtccaccaggctcaagatgctggaggtgccctacgtggaccgcaacagctgcaagctgtccagcagcttcatcatcacccagaacatgttctgtgccggctacgacaccaagcaggaggatgcctgccagggggacagcgggggcccgcacgtcacccgcttcaaggacacctacttcgtgacaggcatcgtcagctggggagagggctgtgcccgtaaggggaagtacgggatctacaccaaggtcaccgccttcctcaagtggatcgacaggtccatgaaaaccaggggcttgcccaaggccaagagccatgccccggaggtcataacgtcctctccattaaaagaccaagtagatccgcggctcattgatgggaag

SEQ ID NO: 118 - protein, 459 aa, Artificial
  Recombinant
ANSFLEEMKKGHLERECMEETCSYEEAREVFEDSDKTNEFWNKYKDGDQCETSPCQNQGKCKDGLGEYTCTCLEGFEGKNCELFTRKLCSLDNGDCDQFCHEEQNSVVCSCARGYTLADNGKACIPTGPYPCGKQTLERRKRSVAQATSSSGEAPDSITWKPYDAADLDPTENPFDLLDFNQTQPERGDNFTPRIVGGQECKDGECPWQALLINEENEGFCGGTILSEFYILTAAHCLYQAKRFKVRVGDRNTEQEEGGEAVHEVEVVIKHNRFTKETYDFDIAVLRLKTPITFRMNVAPACLPERDWAESTLMTQKTGIVSGFGRTHEKGRQSTRLKMLEVPYVDRNSCKLSSSFIITQNMFCAGYDTKQEDACQGDSGGPHVTRFKDTYFVTGIVSWGEGCARKGKYGIYTKVTAFLKWIDRSMKTRGLPKAKSHAPEVITSSPLKDQVDPRLIDGK

SEQ ID NO: 119 - DNA, 1344 bp, Artificial
  Recombinant
gccaattcctttcttgaagagatgaagaaaggacacctcgaaagagagtgcatggaagagacctgctcatacgaagaggcccgcgaggtctttgaggacagcgacaagacgaatgaattctggaataaatacaaagatggcgaccagtgtgagaccagtccttgccagaaccagggcaaatgtaaagacggcctcggggaatacacctgcacctgtttagaaggattcgaaggcaaaaactgtgaattattcacacggaagctctgcagcctggacaacggggactgtgaccagttctgccacgaggaacagaactctgtggtgtgctcctgcgcccgcgggtacaccctggctgacaacggcaaggcctgcattcccacagggccctacccctgtgggaaacagaccctggaacgcaggaagaggtcagtggcccaggccaccagcagcagcggggaggcccctgacagcatcacatggaagccatatgatgcagccgacctggaccccaccgagaaccccttcgacctgcttgacttcaaccagacgcagcctgagaggggcgacaacttcacccccaggatcgtgggaggccaggaatgcaaggacggggagtgtccctggcaggccctgctcatcaatgaggaaaacgagggtttctgtggtggaactattctgagcgagttctacatcctaacggcagcccactgtctctaccaagccaagagattcaaggtgagggtaggggaccggaacacggagcaggaggagggcggtgaggcggtgcacgaggtggaggtggtcatcaagcacaaccggttcacaaaggagacctatgacttcgacatcgccgtgctccggctcaagacccccatcaccttccgcatgaacgtggcgcctgcctgcctccccgagcgtgactgggccgagtccacgctgatgacgcagaagacggggattgtgagtggcttcgggcgcacccacgagaagggccggcagtccaccaggctcaagatgctggaggtgccctacgtggaccgcaacagctgcaagctgtccagcagcttcatcatcacccagaacatgttctgtgccggctacgacaccaagcaggaggatgcctgccagggggacagcgggggcccgcacgtcacccgcttcaaggacacctacttcgtgacaggcatcgtcagctggggagagggctgtgcccgtaaggggaagtacgggatctacaccaaggtcaccgccttcctcaagtggatcgacaggtccatgaaaaccaggggcttgcccaaggccaagagccatgccccggaggtcataacgtcctctccattaaaa

SEQ ID NO: 120 - protein, 448 aa, Artificial
  Recombinant
ANSFLEEMKKGHLERECMEETCSYEEAREVFEDSDKTNEFWNKYKDGDQCETSPCQNQGKCKDGLGEYTCTCLEGFEGKNCELFTRKLCSLDNGDCDQFCHEEQNSVVCSCARGYTLADNGKACIPTGPYPCGKQTLERRKRSVAQATSSSGEAPDSITWKPYDAADLDPTENPFDLLDFNQTQPERGDNFTPRIVGGQECKDGECPWQALLINEENEGFCGGTILSEFYILTAAHCLYQAKRFKVRVGDRNTEQEEGGEAVHEVEVVIKHNRFTKETYDFDIAVLRLKTPITFRMNVAPACLPERDWAESTLMTQKTGIVSGFGRTHEKGRQSTRLKMLEVPYVDRNSCKLSSSFIITQNMFCAGYDTKQEDACQGDSGGPHVTRFKDTYFVTGIVSWGEGCARKGKYGIYTKVTAFLKWIDRSMKTRGLPKAKSHAPEVITSSPLK

SEQ ID NO: 121 - DNA, 1407 bp, Artificial
  Recombinant
gccaattcctttcttgaagagatgaagaaaggacacctcgaaagagagtgcatggaagagacctgctcatacgaagaggcccgcgaggtctttgaggacagcgacaagacgaatgaattctggaataaatacaaagatggcgaccagtgtgagaccagtccttgccagaaccagggcaaatgtaaagacggcctcggggaatacacctgcacctgtttagaaggattcgaaggcaaaaactgtgaattattcacacggaagctctgcagcctggacaacggggactgtgaccagttctgccacgaggaacagaactctgtggtgtgctcctgcgcccgcgggtacaccctggctgacaacggcaaggcctgcattcccacagggccctacccctgtgggaaacagaccctggaacgcaggaagaggtcagtggcccaggccaccagcagcagcggggaggcccctgacagcatcacatggaagccatatgatgcagccgacctggaccccaccgagaaccccttcgacctgcttgacttcaaccagacgcagcctgagaggggcgacaacaacctgaccagatctaccccctctatcctgctgaagcccagaatcgtgggaggccaggaatgcaaggacggggagtgtccctggcaggccctgctcatcaatgaggaaaacgagggtttctgtggtggaactattctgagcgagttctacatcctaacggcagcccactgtctctaccaagccaagagattcaaggtgagggtaggggaccggaacacggagcaggaggagggcggtgaggcggtgcacgaggtggaggtggtcatcaagcacaaccggttcacaaaggagacctatgacttcgacatcgccgtgctccggctcaagacccccatcaccttccgcatgaacgtggcgcctgcctgcctccccgagcgtgactgggccgagtccacgctgatgacgcagaagacggggattgtgagtggcttcgggcgcacccacgagaagggccggcagtccaccaggctcaagatgctggaggtgccctacgtggaccgcaacagctgcaagctgtccagcagcttcatcatcacccagaacatgttctgtgccggctacgacaccaagcaggaggatgcctgccagggggacagcgggggcccgcacgtcacccgcttcaaggacacctacttcgtgacaggcatcgtcagctggggagagggctgtgcccgtaaggggaagtacgggatctacaccaaggtcaccgccttcctcaagtggatcgacaggtccatgaaaaccaggggcttgcccaaggccaagagccatgccccggaggtcataacgtcctctccattaaaagaccaagtagatccgcggctcattgatgggaag

SEQ ID NO: 122 - protein, 469 aa, Artificial
  Recombinant
ANSFLEEMKKGHLERECMEETCSYEEAREVFEDSDKTNEFWNKYKDGDQCETSPCQNQGKCKDGLGEYTCTCLEGFEGKNCELFTRKLCSLDNGDCDQFCHEEQNSVVCSCARGYTLADNGKACIPTGPYPCGKQTLERRKRSVAQATSSSGEAPDSITWKPYDAADLDPTENPFDLLDFNQTQPERGDNNLTRSTPSILLKPRIVGGQECKDGECPWQALLINEENEGFCGGTILSEFYILTAAHCLYQAKRFKVRVGDRNTEQEEGGEAVHEVEVVIKHNRFTKETYDFDIAVLRLKTPITFRMNVAPACLPERDWAESTLMTQKTGIVSGFGRTHEKGRQSTRLKMLEVPYVDRNSCKLSSSFIITQNMFCAGYDTKQEDACQGDSGGPHVTRFKDTYFVTGIVSWGEGCARKGKYGIYTKVTAFLKWIDRSMKTRGLPKAKSHAPEVITSSPLKDQVDPRLIDGK

SEQ ID NO: 123 - DNA, 1374 bp, Artificial
  Recombinant
gccaattcctttcttgaagagatgaagaaaggacacctcgaaagagagtgcatggaagagacctgctcatacgaagaggcccgcgaggtctttgaggacagcgacaagacgaatgaattctggaataaatacaaagatggcgaccagtgtgagaccagtccttgccagaaccagggcaaatgtaaagacggcctcggggaatacacctgcacctgtttagaaggattcgaaggcaaaaactgtgaattattcacacggaagctctgcagcctggacaacggggactgtgaccagttctgccacgaggaacagaactctgtggtgtgctcctgcgcccgcgggtacaccctggctgacaacggcaaggcctgcattcccacagggccctacccctgtgggaaacagaccctggaacgcaggaagaggtcagtggcccaggccaccagcagcagcggggaggcccctgacagcatcacatggaagccatatgatgcagccgacctggaccccaccgagaaccccttcgacctgcttgacttcaaccagacgcagcctgagaggggcgacaacaacctgaccagatctaccccctctatcctgctgaagcccagaatcgtgggaggccaggaatgcaaggacggggagtgtccctggcaggccctgctcatcaatgaggaaaacgagggtttctgtggtggaactattctgagcgagttctacatcctaacggcagcccactgtctctaccaagccaagagattcaaggtgagggtaggggaccggaacacggagcaggaggagggcggtgaggcggtgcacgaggtggaggtggtcatcaagcacaaccggttcacaaaggagacctatgacttcgacatcgccgtgctccggctcaagacccccatcaccttccgcatgaacgtggcgcctgcctgcctccccgagcgtgactgggccgagtccacgctgatgacgcagaagacggggattgtgagtggcttcgggcgcacccacgagaagggccggcagtccaccaggctcaagatgctggaggtgccctacgtggaccgcaacagctgcaagctgtccagcagcttcatcatcacccagaacatgttctgtgccggctacgacaccaagcaggaggatgcctgccagggggacagcgggggcccgcacgtcacccgcttcaaggacacctacttcgtgacaggcatcgtcagctggggagagggctgtgcccgtaaggggaagtacgggatctacaccaaggtcaccgccttcctcaagtggatcgacaggtccatgaaaaccaggggcttgcccaaggccaagagccatgccccggaggtcataacgtcctctccattaaaa

SEQ ID NO: 124 - protein, 458 aa, Artificial
  Recombinant
ANSFLEEMKKGHLERECMEETCSYEEAREVFEDSDKTNEFWNKYKDGDQCETSPCQNQGKCKDGLGEYTCTCLEGFEGKNCELFTRKLCSLDNGDCDQFCHEEQNSVVCSCARGYTLADNGKACIPTGPYPCGKQTLERRKRSVAQATSSSGEAPDSITWKPYDAADLDPTENPFDLLDFNQTQPERGDNNLTRSTPSILLKPRIVGGQECKDGECPWQALLINEENEGFCGGTILSEFYILTAAHCLYQAKRFKVRVGDRNTEQEEGGEAVHEVEVVIKHNRFTKETYDFDIAVLRLKTPITFRMNVAPACLPERDWAESTLMTQKTGIVSGFGRTHEKGRQSTRLKMLEVPYVDRNSCKLSSSFIITQNMFCAGYDTKQEDACQGDSGGPHVTRFKDTYFVTGIVSWGEGCARKGKYGIYTKVTAFLKWIDRSMKTRGLPKAKSHAPEVITSSPLK

SEQ ID NO: 125 - DNA, 1407 bp, Artificial
  Recombinant
gccaattcctttcttgaagagatgaagaaaggacacctcgaaagagagtgcatggaagagacctgctcatacgaagaggcccgcgaggtctttgaggacagcgacaagacgaatgaattctggaataaatacaaagatggcgaccagtgtgagaccagtccttgccagaaccagggcaaatgtaaagacggcctcggggaatacacctgcacctgtttagaaggattcgaaggcaaaaactgtgaattattcacacggaagctctgcagcctggacaacggggactgtgaccagttctgccacgaggaacagaactctgtggtgtgctcctgcgcccgcgggtacaccctggctgacaacggcaaggcctgcattcccacagggccctacccctgtgggaaacagaccctggaacgcaggaagaggtcagtggcccaggccaccagcagcagcggggaggcccctgacagcatcacatggaagccatatgatgcagccgacctggaccccaccgagaaccccttcgacctgcttgacttcaaccagacgcagcctgagaggggcgacaacaacctgaccagatctaccccctctatcctgttcacccccagaatcgtgggaggccaggaatgcaaggacggggagtgtccctggcaggccctgctcatcaatgaggaaaacgagggtttctgtggtggaactattctgagcgagttctacatcctaacggcagcccactgtctctaccaagccaagagattcaaggtgagggtaggggaccggaacacggagcaggaggagggcggtgaggcggtgcacgaggtggaggtggtcatcaagcacaaccggttcacaaaggagacctatgacttcgacatcgccgtgctccggctcaagacccccatcaccttccgcatgaacgtggcgcctgcctgcctccccgagcgtgactgggccgagtccacgctgatgacgcagaagacggggattgtgagtggcttcgggcgcacccacgagaagggccggcagtccaccaggctcaagatgctggaggtgccctacgtggaccgcaacagctgcaagctgtccagcagcttcatcatcacccagaacatgttctgtgccggctacgacaccaagcaggaggatgcctgccagggggacagcgggggcccgcacgtcacccgcttcaaggacacctacttcgtgacaggcatcgtcagctggggagagggctgtgcccgtaaggggaagtacgggatctacaccaaggtcaccgccttcctcaagtggatcgacaggtccatgaaaaccaggggcttgcccaaggccaagagccatgccccggaggtcataacgtcctctccattaaaagaccaagtagatccgcggctcattgatgggaag

SEQ ID NO: 126 - protein, 469 aa, Artificial
  Recombinant
ANSFLEEMKKGHLERECMEETCSYEEAREVFEDSDKTNEFWNKYKDGDQCETSPCQNQGKCKDGLGEYTCTCLEGFEGKNCELFTRKLCSLDNGDCDQFCHEEQNSVVCSCARGYTLADNGKACIPTGPYPCGKQTLERRKRSVAQATSSSGEAPDSITWKPYDAADLDPTENPFDLLDFNQTQPERGDNNLTRSTPSILFTPRIVGGQECKDGECPWQALLINEENEGFCGGTILSEFYILTAAHCLYQAKRFKVRVGDRNTEQEEGGEAVHEVEVVIKHNRFTKETYDFDIAVLRLKTPITFRMNVAPACLPERDWAESTLMTQKTGIVSGFGRTHEKGRQSTRLKMLEVPYVDRNSCKLSSSFIITQNMFCAGYDTKQEDACQGDSGGPHVTRFKDTYFVTGIVSWGEGCARKGKYGIYTKVTAFLKWIDRSMKTRGLPKAKSHAPEVITSSPLKDQVDPRLIDGK

SEQ ID NO: 127 - protein, 1374 aa, Artificial
  Recombinant
GCCAATTCCTTTCTTGAAGAGATGAAGAAAGGACACCTCGAAAGAGAGTGCATGGAAGAGACCTGCTCATACGAAGAGGCCCGCGAGGTCTTTGAGGACAGCGACAAGACGAATGAATTCTGGAATAAATACAAAGATGGCGACCAGTGTGAGACCAGTCCTTGCCAGAACCAGGGCAAATGTAAAGACGGCCTCGGGGAATACACCTGCACCTGTTTAGAAGGATTCGAAGGCAAAAACTGTGAATTATTCACACGGAAGCTCTGCAGCCTGGACAACGGGGACTGTGACCAGTTCTGCCACGAGGAACAGAACTCTGTGGTGTGCTCCTGCGCCCGCGGGTACACCCTGGCTGACAACGGCAAGGCCTGCATTCCCACAGGGCCCTACCCCTGTGGGAAACAGACCCTGGAACGCAGGAAGAGGTCAGTGGCCCAGGCCACCAGCAGCAGCGGGGAGGCCCCTGACAGCATCACATGGAAGCCATATGATGCAGCCGACCTGGACCCCACCGAGAACCCCTTCGACCTGCTTGACTTCAACCAGACGCAGCCTGAGAGGGGCGACAACAACCTGACCAGATCTACCCCCTCTATCCTGTTCACCCCCAGAATCGTGGGAGGCCAGGAATGCAAGGACGGGGAGTGTCCCTGGCAGGCCCTGCTCATCAATGAGGAAAACGAGGGTTTCTGTGGTGGAACTATTCTGAGCGAGTTCTACATCCTAACGGCAGCCCACTGTCTCTACCAAGCCAAGAGATTCAAGGTGAGGGTAGGGGACCGGAACACGGAGCAGGAGGAGGGCGGTGAGGCGGTGCACGAGGTGGAGGTGGTCATCAAGCACAACCGGTTCACAAAGGAGACCTATGACTTCGACATCGCCGTGCTCCGGCTCAAGACCCCCATCACCTTCCGCATGAACGTGGCGCCTGCCTGCCTCCCCGAGCGTGACTGGGCCGAGTCCACGCTGATGACGCAGAAGACGGGGATTGTGAGTGGCTTCGGGCGCACCCACGAGAAGGGCCGGCAGTCCACCAGGCTCAAGATGCTGGAGGTGCCCTACGTGGACCGCAACAGCTGCAAGCTGTCCAGCAGCTTCATCATCACCCAGAACATGTTCTGTGCCGGCTACGACACCAAGCAGGAGGATGCCTGCCAGGGGGACAGCGGGGGCCCGCACGTCACCCGCTTCAAGGACACCTACTTCGTGACAGGCATCGTCAGCTGGGGAGAGGGCTGTGCCCGTAAGGGGAAGTACGGGATCTACACCAAGGTCACCGCCTTCCTCAAGTGGATCGACAGGTCCATGAAAACCAGGGGCTTGCCCAAGGCCAAGAGCCATGCCCCGGAGGTCATAACGTCCTCTCCATTAAAA

SEQ ID NO: 128 - protein, 458 aa, Artificial
  Recombinant
ANSFLEEMKKGHLERECMEETCSYEEAREVFEDSDKTNEFWNKYKDGDQCETSPCQNQGKCKDGLGEYTCTCLEGFEGKNCELFTRKLCSLDNGDCDQFCHEEQNSVVCSCARGYTLADNGKACIPTGPYPCGKQTLERRKRSVAQATSSSGEAPDSITWKPYDAADLDPTENPFDLLDFNQTQPERGDNNLTRSTPSILFTPRIVGGQECKDGECPWQALLINEENEGFCGGTILSEFYILTAAHCLYQAKRFKVRVGDRNTEQEEGGEAVHEVEVVIKHNRFTKETYDFDIAVLRLKTPITFRMNVAPACLPERDWAESTLMTQKTGIVSGFGRTHEKGRQSTRLKMLEVPYVDRNSCKLSSSFIITQNMFCAGYDTKQEDACQGDSGGPHVTRFKDTYFVTGIVSWGEGCARKGKYGIYTKVTAFLKWIDRSMKTRGLPKAKSHAPEVITSSPLK

SEQ ID NO: 129 - DNA, 1407 bp, Artificial
  Recombinant
gccaattcctttcttgaagagatgaagaaaggacacctcgaaagagagtgcatggaagagacctgctcatacgaagaggcccgcgaggtctttgaggacagcgacaagacgaatgaattctggaataaatacaaagatggcgaccagtgtgagaccagtccttgccagaaccagggcaaatgtaaagacggcctcggggaatacacctgcacctgtttagaaggattcgaaggcaaaaactgtgaattattcacacggaagctctgcagcctggacaacggggactgtgaccagttctgccacgaggaacagaactctgtggtgtgctcctgcgcccgcgggtacaccctggctgacaacggcaaggcctgcattcccacagggccctacccctgtgggaaacagaccctggaacgcaggaagaggtcagtggcccaggccaccagcagcagcggggaggcccctgacagcatcacatggaagccatatgatgcagccgacctggaccccaccgagaaccccttcgacctgcttgacttcaaccagacgcagcctgagaggggcgacaacaacctgaccagatctaccccctctatcctgttcaagcccagaatcgtgggaggccaggaatgcaaggacggggagtgtccctggcaggccctgctcatcaatgaggaaaacgagggtttctgtggtggaactattctgagcgagttctacatcctaacggcagcccactgtctctaccaagccaagagattcaaggtgagggtaggggaccggaacacggagcaggaggagggcggtgaggcggtgcacgaggtggaggtggtcatcaagcacaaccggttcacaaaggagacctatgacttcgacatcgccgtgctccggctcaagacccccatcaccttccgcatgaacgtggcgcctgcctgcctccccgagcgtgactgggccgagtccacgctgatgacgcagaagacggggattgtgagtggcttcgggcgcacccacgagaagggccggcagtccaccaggctcaagatgctggaggtgccctacgtggaccgcaacagctgcaagctgtccagcagcttcatcatcacccagaacatgttctgtgccggctacgacaccaagcaggaggatgcctgccagggggacagcgggggcccgcacgtcacccgcttcaaggacacctacttcgtgacaggcatcgtcagctggggagagggctgtgcccgtaaggggaagtacgggatctacaccaaggtcaccgccttcctcaagtggatcgacaggtccatgaaaaccaggggcttgcccaaggccaagagccatgccccggaggtcataacgtcctctccattaaaagaccaagtagatccgcggctcattgatgggaag

SEQ ID NO: 130 - protein, 469 aa, Artificial
  Recombinant
ANSFLEEMKKGHLERECMEETCSYEEAREVFEDSDKTNEFWNKYKDGDQCETSPCQNQGKCKDGLGEYTCTCLEGFEGKNCELFTRKLCSLDNGDCDQFCHEEQNSVVCSCARGYTLADNGKACIPTGPYPCGKQTLERRKRSVAQATSSSGEAPDSITWKPYDAADLDPTENPFDLLDFNQTQPERGDNNLTRSTPSILFKPRIVGGQECKDGECPWQALLINEENEGFCGGTILSEFYILTAAHCLYQAKRFKVRVGDRNTEQEEGGEAVHEVEVVIKHNRFTKETYDFDIAVLRLKTPITFRMNVAPACLPERDWAESTLMTQKTGIVSGFGRTHEKGRQSTRLKMLEVPYVDRNSCKLSSSFIITQNMFCAGYDTKQEDACQGDSGGPHVTRFKDTYFVTGIVSWGEGCARKGKYGIYTKVTAFLKWIDRSMKTRGLPKAKSHAPEVITSSPLKDQVDPRLIDGK

SEQ ID NO: 131 - DNA, 1374 bp, Artificial
  Recombinant
gccaattcctttcttgaagagatgaagaaaggacacctcgaaagagagtgcatggaagagacctgctcatacgaagaggcccgcgaggtctttgaggacagcgacaagacgaatgaattctggaataaatacaaagatggcgaccagtgtgagaccagtccttgccagaaccagggcaaatgtaaagacggcctcggggaatacacctgcacctgtttagaaggattcgaaggcaaaaactgtgaattattcacacggaagctctgcagcctggacaacggggactgtgaccagttctgccacgaggaacagaactctgtggtgtgctcctgcgcccgcgggtacaccctggctgacaacggcaaggcctgcattcccacagggccctacccctgtgggaaacagaccctggaacgcaggaagaggtcagtggcccaggccaccagcagcagcggggaggcccctgacagcatcacatggaagccatatgatgcagccgacctggaccccaccgagaaccccttcgacctgcttgacttcaaccagacgcagcctgagaggggcgacaacaacctgaccagatctaccccctctatcctgttcaagcccagaatcgtgggaggccaggaatgcaaggacggggagtgtccctggcaggccctgctcatcaatgaggaaaacgagggtttctgtggtggaactattctgagcgagttctacatcctaacggcagcccactgtctctaccaagccaagagattcaaggtgagggtaggggaccggaacacggagcaggaggagggcggtgaggcggtgcacgaggtggaggtggtcatcaagcacaaccggttcacaaaggagacctatgacttcgacatcgccgtgctccggctcaagacccccatcaccttccgcatgaacgtggcgcctgcctgcctccccgagcgtgactgggccgagtccacgctgatgacgcagaagacggggattgtgagtggcttcgggcgcacccacgagaagggccggcagtccaccaggctcaagatgctggaggtgccctacgtggaccgcaacagctgcaagctgtccagcagcttcatcatcacccagaacatgttctgtgccggctacgacaccaagcaggaggatgcctgccagggggacagcgggggcccgcacgtcacccgcttcaaggacacctacttcgtgacaggcatcgtcagctggggagagggctgtgcccgtaaggggaagtacgggatctacaccaaggtcaccgccttcctcaagtggatcgacaggtccatgaaaaccaggggcttgcccaaggccaagagccatgccccggaggtcataacgtcctctccattaaaa

SEQ ID NO: 132 - protein, 458 aa, Artificial
  Recombinant
ANSFLEEMKKGHLERECMEETCSYEEAREVFEDSDKTNEFWNKYKDGDQCETSPCQNQGKCKDGLGEYTCTCLEGFEGKNCELFTRKLCSLDNGDCDQFCHEEQNSVVCSCARGYTLADNGKACIPTGPYPCGKQTLERRKRSVAQATSSSGEAPDSITWKPYDAADLDPTENPFDLLDFNQTQPERGDNNLTRSTPSILFKPRIVGGQECKDGECPWQALLINEENEGFCGGTILSEFYILTAAHCLYQAKRFKVRVGDRNTEQEEGGEAVHEVEVVIKHNRFTKETYDFDIAVLRLKTPITFRMNVAPACLPERDWAESTLMTQKTGIVSGFGRTHEKGRQSTRLKMLEVPYVDRNSCKLSSSFIITQNMFCAGYDTKQEDACQGDSGGPHVTRFKDTYFVTGIVSWGEGCARKGKYGIYTKVTAFLKWIDRSMKTRGLPKAKSHAPEVITSSPLK

SEQ ID NO: 133 - DNA, 1407 bp, Artificial
  Recombinant
gccaattcctttcttgaagagatgaagaaaggacacctcgaaagagagtgcatggaagagacctgctcatacgaagaggcccgcgaggtctttgaggacagcgacaagacgaatgaattctggaataaatacaaagatggcgaccagtgtgagaccagtccttgccagaaccagggcaaatgtaaagacggcctcggggaatacacctgcacctgtttagaaggattcgaaggcaaaaactgtgaattattcacacggaagctctgcagcctggacaacggggactgtgaccagttctgccacgaggaacagaactctgtggtgtgctcctgcgcccgcgggtacaccctggctgacaacggcaaggcctgcattcccacagggccctacccctgtgggaaacagaccctggaacgcaggaagaggtcagtggcccaggccaccagcagcagcggggaggcccctgacagcatcacatggaagccatatgatgcagccgacctggaccccaccgagaaccccttcgacctgcttgacttcaaccagacgcagcctgagaggggcgacaacaacctgaccagatctaccccctctatcctgatgaagcccagaatcgtgggaggccaggaatgcaaggacggggagtgtccctggcaggccctgctcatcaatgaggaaaacgagggtttctgtggtggaactattctgagcgagttctacatcctaacggcagcccactgtctctaccaagccaagagattcaaggtgagggtaggggaccggaacacggagcaggaggagggcggtgaggcggtgcacgaggtggaggtggtcatcaagcacaaccggttcacaaaggagacctatgacttcgacatcgccgtgctccggctcaagacccccatcaccttccgcatgaacgtggcgcctgcctgcctccccgagcgtgactgggccgagtccacgctgatgacgcagaagacggggattgtgagtggcttcgggcgcacccacgagaagggccggcagtccaccaggctcaagatgctggaggtgccctacgtggaccgcaacagctgcaagctgtccagcagcttcatcatcacccagaacatgttctgtgccggctacgacaccaagcaggaggatgcctgccagggggacagcgggggcccgcacgtcacccgcttcaaggacacctacttcgtgacaggcatcgtcagctggggagagggctgtgcccgtaaggggaagtacgggatctacaccaaggtcaccgccttcctcaagtggatcgacaggtccatgaaaaccaggggcttgcccaaggccaagagccatgccccggaggtcataacgtcctctccattaaaagaccaagtagatccgcggctcattgatgggaag

SEQ ID NO: 134 - protein, 469 aa, Artificial
  Recombinant
ANSFLEEMKKGHLERECMEETCSYEEAREVFEDSDKTNEFWNKYKDGDQCETSPCQNQGKCKDGLGEYTCTCLEGFEGKNCELFTRKLCSLDNGDCDQFCHEEQNSVVCSCARGYTLADNGKACIPTGPYPCGKQTLERRKRSVAQATSSSGEAPDSITWKPYDAADLDPTENPFDLLDFNQTQPERGDNNLTRSTPSILMKPRIVGGQECKDGECPWQALLINEENEGFCGGTILSEFYILTAAHCLYQAKRFKVRVGDRNTEQEEGGEAVHEVEVVIKHNRFTKETYDFDIAVLRLKTPITFRMNVAPACLPERDWAESTLMTQKTGIVSGFGRTHEKGRQSTRLKMLEVPYVDRNSCKLSSSFIITQNMFCAGYDTKQEDACQGDSGGPHVTRFKDTYFVTGIVSWGEGCARKGKYGIYTKVTAFLKWIDRSMKTRGLPKAKSHAPEVITSSPLKDQVDPRLIDGK

SEQ ID NO: 135 - DNA, 1374 bp, Artificial
  Recombinant
gccaattcctttcttgaagagatgaagaaaggacacctcgaaagagagtgcatggaagagacctgctcatacgaagaggcccgcgaggtctttgaggacagcgacaagacgaatgaattctggaataaatacaaagatggcgaccagtgtgagaccagtccttgccagaaccagggcaaatgtaaagacggcctcggggaatacacctgcacctgtttagaaggattcgaaggcaaaaactgtgaattattcacacggaagctctgcagcctggacaacggggactgtgaccagttctgccacgaggaacagaactctgtggtgtgctcctgcgcccgcgggtacaccctggctgacaacggcaaggcctgcattcccacagggccctacccctgtgggaaacagaccctggaacgcaggaagaggtcagtggcccaggccaccagcagcagcggggaggcccctgacagcatcacatggaagccatatgatgcagccgacctggaccccaccgagaaccccttcgacctgcttgacttcaaccagacgcagcctgagaggggcgacaacaacctgaccagatctaccccctctatcctgatgaagcccagaatcgtgggaggccaggaatgcaaggacggggagtgtccctggcaggccctgctcatcaatgaggaaaacgagggtttctgtggtggaactattctgagcgagttctacatcctaacggcagcccactgtctctaccaagccaagagattcaaggtgagggtaggggaccggaacacggagcaggaggagggcggtgaggcggtgcacgaggtggaggtggtcatcaagcacaaccggttcacaaaggagacctatgacttcgacatcgccgtgctccggctcaagacccccatcaccttccgcatgaacgtggcgcctgcctgcctccccgagcgtgactgggccgagtccacgctgatgacgcagaagacggggattgtgagtggcttcgggcgcacccacgagaagggccggcagtccaccaggctcaagatgctggaggtgccctacgtggaccgcaacagctgcaagctgtccagcagcttcatcatcacccagaacatgttctgtgccggctacgacaccaagcaggaggatgcctgccagggggacagcgggggcccgcacgtcacccgcttcaaggacacctacttcgtgacaggcatcgtcagctggggagagggctgtgcccgtaaggggaagtacgggatctacaccaaggtcaccgccttcctcaagtggatcgacaggtccatgaaaaccaggggcttgcccaaggccaagagccatgccccggaggtcataacgtcctctccattaaaa

SEQ ID NO: 136 - protein, 458 aa, Artificial
  Recombinant
ANSFLEEMKKGHLERECMEETCSYEEAREVFEDSDKTNEFWNKYKDGDQCETSPCQNQGKCKDGLGEYTCTCLEGFEGKNCELFTRKLCSLDNGDCDQFCHEEQNSVVCSCARGYTLADNGKACIPTGPYPCGKQTLERRKRSVAQATSSSGEAPDSITWKPYDAADLDPTENPFDLLDFNQTQPERGDNNLTRSTPSILMKPRIVGGQECKDGECPWQALLINEENEGFCGGTILSEFYILTAAHCLYQAKRFKVRVGDRNTEQEEGGEAVHEVEVVIKHNRFTKETYDFDIAVLRLKTPITFRMNVAPACLPERDWAESTLMTQKTGIVSGFGRTHEKGRQSTRLKMLEVPYVDRNSCKLSSSFIITQNMFCAGYDTKQEDACQGDSGGPHVTRFKDTYFVTGIVSWGEGCARKGKYGIYTKVTAFLKWIDRSMKTRGLPKAKSHAPEVITSSPLK

SEQ ID NO: 137 - DNA, 1407 bp, Artificial
  Recombinant
gccaattcctttcttgaagagatgaagaaaggacacctcgaaagagagtgcatggaagagacctgctcatacgaagaggcccgcgaggtctttgaggacagcgacaagacgaatgaattctggaataaatacaaagatggcgaccagtgtgagaccagtccttgccagaaccagggcaaatgtaaagacggcctcggggaatacacctgcacctgtttagaaggattcgaaggcaaaaactgtgaattattcacacggaagctctgcagcctggacaacggggactgtgaccagttctgccacgaggaacagaactctgtggtgtgctcctgcgcccgcgggtacaccctggctgacaacggcaaggcctgcattcccacagggccctacccctgtgggaaacagaccctggaacgcaggaagaggtcagtggcccaggccaccagcagcagcggggaggcccctgacagcatcacatggaagccatatgatgcagccgacctggaccccaccgagaaccccttcgacctgcttgacttcaaccagacgcagcctgagaggggcgacaacaacctgaccagatctaccccctctatcctgtggcagcccagaatcgtgggaggccaggaatgcaaggacggggagtgtccctggcaggccctgctcatcaatgaggaaaacgagggtttctgtggtggaactattctgagcgagttctacatcctaacggcagcccactgtctctaccaagccaagagattcaaggtgagggtaggggaccggaacacggagcaggaggagggcggtgaggcggtgcacgaggtggaggtggtcatcaagcacaaccggttcacaaaggagacctatgacttcgacatcgccgtgctccggctcaagacccccatcaccttccgcatgaacgtggcgcctgcctgcctccccgagcgtgactgggccgagtccacgctgatgacgcagaagacggggattgtgagtggcttcgggcgcacccacgagaagggccggcagtccaccaggctcaagatgctggaggtgccctacgtggaccgcaacagctgcaagctgtccagcagcttcatcatcacccagaacatgttctgtgccggctacgacaccaagcaggaggatgcctgccagggggacagcgggggcccgcacgtcacccgcttcaaggacacctacttcgtgacaggcatcgtcagctggggagagggctgtgcccgtaaggggaagtacgggatctacaccaaggtcaccgccttcctcaagtggatcgacaggtccatgaaaaccaggggcttgcccaaggccaagagccatgccccggaggtcataacgtcctctccattaaaagaccaagtagatccgcggctcattgatgggaag

SEQ ID NO: 138 - protein, 469 aa, Artificial
  Recombinant
ANSFLEEMKKGHLERECMEETCSYEEAREVFEDSDKTNEFWNKYKDGDQCETSPCQNQGKCKDGLGEYTCTCLEGFEGKNCELFTRKLCSLDNGDCDQFCHEEQNSVVCSCARGYTLADNGKACIPTGPYPCGKQTLERRKRSVAQATSSSGEAPDSITWKPYDAADLDPTENPFDLLDFNQTQPERGDNNLTRSTPSILWQPRIVGGQECKDGECPWQALLINEENEGFCGGTILSEFYILTAAHCLYQAKRFKVRVGDRNTEQEEGGEAVHEVEVVIKHNRFTKETYDFDIAVLRLKTPITFRMNVAPACLPERDWAESTLMTQKTGIVSGFGRTHEKGRQSTRLKMLEVPYVDRNSCKLSSSFIITQNMFCAGYDTKQEDACQGDSGGPHVTRFKDTYFVTGIVSWGEGCARKGKYGIYTKVTAFLKWIDRSMKTRGLPKAKSHAPEVITSSPLKDQVDPRLIDGK

SEQ ID NO: 139 - DNA, 1374 bp, Artificial
  Recombinant
gccaattcctttcttgaagagatgaagaaaggacacctcgaaagagagtgcatggaagagacctgctcatacgaagaggcccgcgaggtctttgaggacagcgacaagacgaatgaattctggaataaatacaaagatggcgaccagtgtgagaccagtccttgccagaaccagggcaaatgtaaagacggcctcggggaatacacctgcacctgtttagaaggattcgaaggcaaaaactgtgaattattcacacggaagctctgcagcctggacaacggggactgtgaccagttctgccacgaggaacagaactctgtggtgtgctcctgcgcccgcgggtacaccctggctgacaacggcaaggcctgcattcccacagggccctacccctgtgggaaacagaccctggaacgcaggaagaggtcagtggcccaggccaccagcagcagcggggaggcccctgacagcatcacatggaagccatatgatgcagccgacctggaccccaccgagaaccccttcgacctgcttgacttcaaccagacgcagcctgagaggggcgacaacaacctgaccagatctaccccctctatcctgtggcagcccagaatcgtgggaggccaggaatgcaaggacggggagtgtccctggcaggccctgctcatcaatgaggaaaacgagggtttctgtggtggaactattctgagcgagttctacatcctaacggcagcccactgtctctaccaagccaagagattcaaggtgagggtaggggaccggaacacggagcaggaggagggcggtgaggcggtgcacgaggtggaggtggtcatcaagcacaaccggttcacaaaggagacctatgacttcgacatcgccgtgctccggctcaagacccccatcaccttccgcatgaacgtggcgcctgcctgcctccccgagcgtgactgggccgagtccacgctgatgacgcagaagacggggattgtgagtggcttcgggcgcacccacgagaagggccggcagtccaccaggctcaagatgctggaggtgccctacgtggaccgcaacagctgcaagctgtccagcagcttcatcatcacccagaacatgttctgtgccggctacgacaccaagcaggaggatgcctgccagggggacagcgggggcccgcacgtcacccgcttcaaggacacctacttcgtgacaggcatcgtcagctggggagagggctgtgcccgtaaggggaagtacgggatctacaccaaggtcaccgccttcctcaagtggatcgacaggtccatgaaaaccaggggcttgcccaaggccaagagccatgccccggaggtcataacgtcctctccattaaaa

SEQ ID NO: 140 - protein, 458 aa, Artificial
  Recombinant
ANSFLEEMKKGHLERECMEETCSYEEAREVFEDSDKTNEFWNKYKDGDQCETSPCQNQGKCKDGLGEYTCTCLEGFEGKNCELFTRKLCSLDNGDCDQFCHEEQNSVVCSCARGYTLADNGKACIPTGPYPCGKQTLERRKRSVAQATSSSGEAPDSITWKPYDAADLDPTENPFDLLDFNQTQPERGDNNLTRSTPSILWQPRIVGGQECKDGECPWQALLINEENEGFCGGTILSEFYILTAAHCLYQAKRFKVRVGDRNTEQEEGGEAVHEVEVVIKHNRFTKETYDFDIAVLRLKTPITFRMNVAPACLPERDWAESTLMTQKTGIVSGFGRTHEKGRQSTRLKMLEVPYVDRNSCKLSSSFIITQNMFCAGYDTKQEDACQGDSGGPHVTRFKDTYFVTGIVSWGEGCARKGKYGIYTKVTAFLKWIDRSMKTRGLPKAKSHAPEVITSSPLK

SEQ ID NO: 141 - DNA, 1407 bp, Artificial
  Recombinant
gccaattcctttcttgaagagatgaagaaaggacacctcgaaagagagtgcatggaagagacctgctcatacgaagaggcccgcgaggtctttgaggacagcgacaagacgaatgaattctggaataaatacaaagatggcgaccagtgtgagaccagtccttgccagaaccagggcaaatgtaaagacggcctcggggaatacacctgcacctgtttagaaggattcgaaggcaaaaactgtgaattattcacacggaagctctgcagcctggacaacggggactgtgaccagttctgccacgaggaacagaactctgtggtgtgctcctgcgcccgcgggtacaccctggctgacaacggcaaggcctgcattcccacagggccctacccctgtgggaaacagaccctggaacgcaggaagaggtcagtggcccaggccaccagcagcagcggggaggcccctgacagcatcacatggaagccatatgatgcagccgacctggaccccaccgagaaccccttcgacctgcttgacttcaaccagacgcagcctgagaggggcgacaacaacctgaccagatctaccccctctatcctgctgaggcccagaatcgtgggaggccaggaatgcaaggacggggagtgtccctggcaggccctgctcatcaatgaggaaaacgagggtttctgtggtggaactattctgagcgagttctacatcctaacggcagcccactgtctctaccaagccaagagattcaaggtgagggtaggggaccggaacacggagcaggaggagggcggtgaggcggtgcacgaggtggaggtggtcatcaagcacaaccggttcacaaaggagacctatgacttcgacatcgccgtgctccggctcaagacccccatcaccttccgcatgaacgtggcgcctgcctgcctccccgagcgtgactgggccgagtccacgctgatgacgcagaagacggggattgtgagtggcttcgggcgcacccacgagaagggccggcagtccaccaggctcaagatgctggaggtgccctacgtggaccgcaacagctgcaagctgtccagcagcttcatcatcacccagaacatgttctgtgccggctacgacaccaagcaggaggatgcctgccagggggacagcgggggcccgcacgtcacccgcttcaaggacacctacttcgtgacaggcatcgtcagctggggagagggctgtgcccgtaaggggaagtacgggatctacaccaaggtcaccgccttcctcaagtggatcgacaggtccatgaaaaccaggggcttgcccaaggccaagagccatgccccggaggtcataacgtcctctccattaaaagaccaagtagatccgcggctcattgatgggaag

SEQ ID NO: 142 - protein, 469 aa, Artificial
  Recombinant
ANSFLEEMKKGHLERECMEETCSYEEAREVFEDSDKTNEFWNKYKDGDQCETSPCQNQGKCKDGLGEYTCTCLEGFEGKNCELFTRKLCSLDNGDCDQFCHEEQNSVVCSCARGYTLADNGKACIPTGPYPCGKQTLERRKRSVAQATSSSGEAPDSITWKPYDAADLDPTENPFDLLDFNQTQPERGDNNLTRSTPSILLRPRIVGGQECKDGECPWQALLINEENEGFCGGTILSEFYILTAAHCLYQAKRFKVRVGDRNTEQEEGGEAVHEVEVVIKHNRFTKETYDFDIAVLRLKTPITFRMNVAPACLPERDWAESTLMTQKTGIVSGFGRTHEKGRQSTRLKMLEVPYVDRNSCKLSSSFIITQNMFCAGYDTKQEDACQGDSGGPHVTRFKDTYFVTGIVSWGEGCARKGKYGIYTKVTAFLKWIDRSMKTRGLPKAKSHAPEVITSSPLKDQVDPRLIDGK

SEQ ID NO: 143 - DNA, 1374 bp, Artificial
  Recombinant
gccaattcctttcttgaagagatgaagaaaggacacctcgaaagagagtgcatggaagagacctgctcatacgaagaggcccgcgaggtctttgaggacagcgacaagacgaatgaattctggaataaatacaaagatggcgaccagtgtgagaccagtccttgccagaaccagggcaaatgtaaagacggcctcggggaatacacctgcacctgtttagaaggattcgaaggcaaaaactgtgaattattcacacggaagctctgcagcctggacaacggggactgtgaccagttctgccacgaggaacagaactctgtggtgtgctcctgcgcccgcgggtacaccctggctgacaacggcaaggcctgcattcccacagggccctacccctgtgggaaacagaccctggaacgcaggaagaggtcagtggcccaggccaccagcagcagcggggaggcccctgacagcatcacatggaagccatatgatgcagccgacctggaccccaccgagaaccccttcgacctgcttgacttcaaccagacgcagcctgagaggggcgacaacaacctgaccagatctaccccctctatcctgctgaggcccagaatcgtgggaggccaggaatgcaaggacggggagtgtccctggcaggccctgctcatcaatgaggaaaacgagggtttctgtggtggaactattctgagcgagttctacatcctaacggcagcccactgtctctaccaagccaagagattcaaggtgagggtaggggaccggaacacggagcaggaggagggcggtgaggcggtgcacgaggtggaggtggtcatcaagcacaaccggttcacaaaggagacctatgacttcgacatcgccgtgctccggctcaagacccccatcaccttccgcatgaacgtggcgcctgcctgcctccccgagcgtgactgggccgagtccacgctgatgacgcagaagacggggattgtgagtggcttcgggcgcacccacgagaagggccggcagtccaccaggctcaagatgctggaggtgccctacgtggaccgcaacagctgcaagctgtccagcagcttcatcatcacccagaacatgttctgtgccggctacgacaccaagcaggaggatgcctgccagggggacagcgggggcccgcacgtcacccgcttcaaggacacctacttcgtgacaggcatcgtcagctggggagagggctgtgcccgtaaggggaagtacgggatctacaccaaggtcaccgccttcctcaagtggatcgacaggtccatgaaaaccaggggcttgcccaaggccaagagccatgccccggaggtcataacgtcctctccattaaaa

SEQ ID NO: 144 - protein, 458 aa, Artificial
  Recombinant
ANSFLEEMKKGHLERECMEETCSYEEAREVFEDSDKTNEFWNKYKDGDQCETSPCQNQGKCKDGLGEYTCTCLEGFEGKNCELFTRKLCSLDNGDCDQFCHEEQNSVVCSCARGYTLADNGKACIPTGPYPCGKQTLERRKRSVAQATSSSGEAPDSITWKPYDAADLDPTENPFDLLDFNQTQPERGDNNLTRSTPSILLRPRIVGGQECKDGECPWQALLINEENEGFCGGTILSEFYILTAAHCLYQAKRFKVRVGDRNTEQEEGGEAVHEVEVVIKHNRFTKETYDFDIAVLRLKTPITFRMNVAPACLPERDWAESTLMTQKTGIVSGFGRTHEKGRQSTRLKMLEVPYVDRNSCKLSSSFIITQNMFCAGYDTKQEDACQGDSGGPHVTRFKDTYFVTGIVSWGEGCARKGKYGIYTKVTAFLKWIDRSMKTRGLPKAKSHAPEVITSSPLK

SEQ ID NO: 145 - DNA, 1407 bp, Artificial
  Recombinant
gccaattcctttcttgaagagatgaagaaaggacacctcgaaagagagtgcatggaagagacctgctcatacgaagaggcccgcgaggtctttgaggacagcgacaagacgaatgaattctggaataaatacaaagatggcgaccagtgtgagaccagtccttgccagaaccagggcaaatgtaaagacggcctcggggaatacacctgcacctgtttagaaggattcgaaggcaaaaactgtgaattattcacacggaagctctgcagcctggacaacggggactgtgaccagttctgccacgaggaacagaactctgtggtgtgctcctgcgcccgcgggtacaccctggctgacaacggcaaggcctgcattcccacagggccctacccctgtgggaaacagaccctggaacgcaggaagaggtcagtggcccaggccaccagcagcagcggggaggcccctgacagcatcacatggaagccatatgatgcagccgacctggaccccaccgagaaccccttcgacctgcttgacttcaaccagacgcagcctgagaggggcgacaacaacctgaccagatctaccccctctatcctgatgacccccagaatcgtgggaggccaggaatgcaaggacggggagtgtccctggcaggccctgctcatcaatgaggaaaacgagggtttctgtggtggaactattctgagcgagttctacatcctaacggcagcccactgtctctaccaagccaagagattcaaggtgagggtaggggaccggaacacggagcaggaggagggcggtgaggcggtgcacgaggtggaggtggtcatcaagcacaaccggttcacaaaggagacctatgacttcgacatcgccgtgctccggctcaagacccccatcaccttccgcatgaacgtggcgcctgcctgcctccccgagcgtgactgggccgagtccacgctgatgacgcagaagacggggattgtgagtggcttcgggcgcacccacgagaagggccggcagtccaccaggctcaagatgctggaggtgccctacgtggaccgcaacagctgcaagctgtccagcagcttcatcatcacccagaacatgttctgtgccggctacgacaccaagcaggaggatgcctgccagggggacagcgggggcccgcacgtcacccgcttcaaggacacctacttcgtgacaggcatcgtcagctggggagagggctgtgcccgtaaggggaagtacgggatctacaccaaggtcaccgccttcctcaagtggatcgacaggtccatgaaaaccaggggcttgcccaaggccaagagccatgccccggaggtcataacgtcctctccattaaaagaccaagtagatccgcggctcattgatgggaag

SEQ ID NO: 146 - protein, 469 aa, Artificial
  Recombinant
ANSFLEEMKKGHLERECMEETCSYEEAREVFEDSDKTNEFWNKYKDGDQCETSPCQNQGKCKDGLGEYTCTCLEGFEGKNCELFTRKLCSLDNGDCDQFCHEEQNSVVCSCARGYTLADNGKACIPTGPYPCGKQTLERRKRSVAQATSSSGEAPDSITWKPYDAADLDPTENPFDLLDFNQTQPERGDNNLTRSTPSILMTPRIVGGQECKDGECPWQALLINEENEGFCGGTILSEFYILTAAHCLYQAKRFKVRVGDRNTEQEEGGEAVHEVEVVIKHNRFTKETYDFDIAVLRLKTPITFRMNVAPACLPERDWAESTLMTQKTGIVSGFGRTHEKGRQSTRLKMLEVPYVDRNSCKLSSSFIITQNMFCAGYDTKQEDACQGDSGGPHVTRFKDTYFVTGIVSWGEGCARKGKYGIYTKVTAFLKWIDRSMKTRGLPKAKSHAPEVITSSPLKDQVDPRLIDGK

SEQ ID NO: 147 - DNA, 1374 bp, Artificial
  Recombinant
gccaattcctttcttgaagagatgaagaaaggacacctcgaaagagagtgcatggaagagacctgctcatacgaagaggcccgcgaggtctttgaggacagcgacaagacgaatgaattctggaataaatacaaagatggcgaccagtgtgagaccagtccttgccagaaccagggcaaatgtaaagacggcctcggggaatacacctgcacctgtttagaaggattcgaaggcaaaaactgtgaattattcacacggaagctctgcagcctggacaacggggactgtgaccagttctgccacgaggaacagaactctgtggtgtgctcctgcgcccgcgggtacaccctggctgacaacggcaaggcctgcattcccacagggccctacccctgtgggaaacagaccctggaacgcaggaagaggtcagtggcccaggccaccagcagcagcggggaggcccctgacagcatcacatggaagccatatgatgcagccgacctggaccccaccgagaaccccttcgacctgcttgacttcaaccagacgcagcctgagaggggcgacaacaacctgaccagatctaccccctctatcctgatgacccccagaatcgtgggaggccaggaatgcaaggacggggagtgtccctggcaggccctgctcatcaatgaggaaaacgagggtttctgtggtggaactattctgagcgagttctacatcctaacggcagcccactgtctctaccaagccaagagattcaaggtgagggtaggggaccggaacacggagcaggaggagggcggtgaggcggtgcacgaggtggaggtggtcatcaagcacaaccggttcacaaaggagacctatgacttcgacatcgccgtgctccggctcaagacccccatcaccttccgcatgaacgtggcgcctgcctgcctccccgagcgtgactgggccgagtccacgctgatgacgcagaagacggggattgtgagtggcttcgggcgcacccacgagaagggccggcagtccaccaggctcaagatgctggaggtgccctacgtggaccgcaacagctgcaagctgtccagcagcttcatcatcacccagaacatgttctgtgccggctacgacaccaagcaggaggatgcctgccagggggacagcgggggcccgcacgtcacccgcttcaaggacacctacttcgtgacaggcatcgtcagctggggagagggctgtgcccgtaaggggaagtacgggatctacaccaaggtcaccgccttcctcaagtggatcgacaggtccatgaaaaccaggggcttgcccaaggccaagagccatgccccggaggtcataacgtcctctccattaaaa

SEQ ID NO: 148 - protein, 458 aa, Artificial
  Recombinant
ANSFLEEMKKGHLERECMEETCSYEEAREVFEDSDKTNEFWNKYKDGDQCETSPCQNQGKCKDGLGEYTCTCLEGFEGKNCELFTRKLCSLDNGDCDQFCHEEQNSVVCSCARGYTLADNGKACIPTGPYPCGKQTLERRKRSVAQATSSSGEAPDSITWKPYDAADLDPTENPFDLLDFNQTQPERGDNNLTRSTPSILMTPRIVGGQECKDGECPWQALLINEENEGFCGGTILSEFYILTAAHCLYQAKRFKVRVGDRNTEQEEGGEAVHEVEVVIKHNRFTKETYDFDIAVLRLKTPITFRMNVAPACLPERDWAESTLMTQKTGIVSGFGRTHEKGRQSTRLKMLEVPYVDRNSCKLSSSFIITQNMFCAGYDTKQEDACQGDSGGPHVTRFKDTYFVTGIVSWGEGCARKGKYGIYTKVTAFLKWIDRSMKTRGLPKAKSHAPEVITSSPLK

SEQ ID NO: 149 - DNA, 1401 bp, Artificial
  Recombinant
gccaattcctttcttgaagagatgaagaaaggacacctcgaaagagagtgcatggaagagacctgctcatacgaagaggcccgcgaggtctttgaggacagcgacaagacgaatgaattctggaataaatacaaagatggcgaccagtgtgagaccagtccttgccagaaccagggcaaatgtaaagacggcctcggggaatacacctgcacctgtttagaaggattcgaaggcaaaaactgtgaattattcacacggaagctctgcagcctggacaacggggactgtgaccagttctgccacgaggaacagaactctgtggtgtgctcctgcgcccgcgggtacaccctggctgacaacggcaaggcctgcattcccacagggccctacccctgtgggaaacagaccctggaacgcaggaagaggtcagtggcccaggccaccagcagcagcggggaggcccctgacagcatcacatggaagccatatgatgcagccgacctggaccccaccgagaaccccttcgacctgcttgacttcaaccagacgcagcctgagaggggcgacaacaacctgaccagaccctctatcctgctgaagcccagaatcgtgggaggccaggaatgcaaggacggggagtgtccctggcaggccctgctcatcaatgaggaaaacgagggtttctgtggtggaactattctgagcgagttctacatcctaacggcagcccactgtctctaccaagccaagagattcaaggtgagggtaggggaccggaacacggagcaggaggagggcggtgaggcggtgcacgaggtggaggtggtcatcaagcacaaccggttcacaaaggagacctatgacttcgacatcgccgtgctccggctcaagacccccatcaccttccgcatgaacgtggcgcctgcctgcctccccgagcgtgactgggccgagtccacgctgatgacgcagaagacggggattgtgagtggcttcgggcgcacccacgagaagggccggcagtccaccaggctcaagatgctggaggtgccctacgtggaccgcaacagctgcaagctgtccagcagcttcatcatcacccagaacatgttctgtgccggctacgacaccaagcaggaggatgcctgccagggggacagcgggggcccgcacgtcacccgcttcaaggacacctacttcgtgacaggcatcgtcagctggggagagggctgtgcccgtaaggggaagtacgggatctacaccaaggtcaccgccttcctcaagtggatcgacaggtccatgaaaaccaggggcttgcccaaggccaagagccatgccccggaggtcataacgtcctctccattaaaagaccaagtagatccgcggctcattgatgggaag

SEQ ID NO: 150 - protein, 467 aa, Artificial
  Recombinant
ANSFLEEMKKGHLERECMEETCSYEEAREVFEDSDKTNEFWNKYKDGDQCETSPCQNQGKCKDGLGEYTCTCLEGFEGKNCELFTRKLCSLDNGDCDQFCHEEQNSVVCSCARGYTLADNGKACIPTGPYPCGKQTLERRKRSVAQATSSSGEAPDSITWKPYDAADLDPTENPFDLLDFNQTQPERGDNNLTRPSILLKPRIVGGQECKDGECPWQALLINEENEGFCGGTILSEFYILTAAHCLYQAKRFKVRVGDRNTEQEEGGEAVHEVEVVIKHNRFTKETYDFDIAVLRLKTPITFRMNVAPACLPERDWAESTLMTQKTGIVSGFGRTHEKGRQSTRLKMLEVPYVDRNSCKLSSSFIITQNMFCAGYDTKQEDACQGDSGGPHVTRFKDTYFVTGIVSWGEGCARKGKYGIYTKVTAFLKWIDRSMKTRGLPKAKSHAPEVITSSPLKDQVDPRLIDGK

SEQ ID NO: 151 - DNA, 1368 bp, Artificial
  Recombinant
gccaattcctttcttgaagagatgaagaaaggacacctcgaaagagagtgcatggaagagacctgctcatacgaagaggcccgcgaggtctttgaggacagcgacaagacgaatgaattctggaataaatacaaagatggcgaccagtgtgagaccagtccttgccagaaccagggcaaatgtaaagacggcctcggggaatacacctgcacctgtttagaaggattcgaaggcaaaaactgtgaattattcacacggaagctctgcagcctggacaacggggactgtgaccagttctgccacgaggaacagaactctgtggtgtgctcctgcgcccgcgggtacaccctggctgacaacggcaaggcctgcattcccacagggccctacccctgtgggaaacagaccctggaacgcaggaagaggtcagtggcccaggccaccagcagcagcggggaggcccctgacagcatcacatggaagccatatgatgcagccgacctggaccccaccgagaaccccttcgacctgcttgacttcaaccagacgcagcctgagaggggcgacaacaacctgaccagaccctctatcctgctgaagcccagaatcgtgggaggccaggaatgcaaggacggggagtgtccctggcaggccctgctcatcaatgaggaaaacgagggtttctgtggtggaactattctgagcgagttctacatcctaacggcagcccactgtctctaccaagccaagagattcaaggtgagggtaggggaccggaacacggagcaggaggagggcggtgaggcggtgcacgaggtggaggtggtcatcaagcacaaccggttcacaaaggagacctatgacttcgacatcgccgtgctccggctcaagacccccatcaccttccgcatgaacgtggcgcctgcctgcctccccgagcgtgactgggccgagtccacgctgatgacgcagaagacggggattgtgagtggcttcgggcgcacccacgagaagggccggcagtccaccaggctcaagatgctggaggtgccctacgtggaccgcaacagctgcaagctgtccagcagcttcatcatcacccagaacatgttctgtgccggctacgacaccaagcaggaggatgcctgccagggggacagcgggggcccgcacgtcacccgcttcaaggacacctacttcgtgacaggcatcgtcagctggggagagggctgtgcccgtaaggggaagtacgggatctacaccaaggtcaccgccttcctcaagtggatcgacaggtccatgaaaaccaggggcttgcccaaggccaagagccatgccccggaggtcataacgtcctctccattaaaa

SEQ ID NO: 152 - protein, 456 aa, Artificial
  Recombinant
ANSFLEEMKKGHLERECMEETCSYEEAREVFEDSDKTNEFWNKYKDGDQCETSPCQNQGKCKDGLGEYTCTCLEGFEGKNCELFTRKLCSLDNGDCDQFCHEEQNSVVCSCARGYTLADNGKACIPTGPYPCGKQTLERRKRSVAQATSSSGEAPDSITWKPYDAADLDPTENPFDLLDFNQTQPERGDNNLTRPSILLKPRIVGGQECKDGECPWQALLINEENEGFCGGTILSEFYILTAAHCLYQAKRFKVRVGDRNTEQEEGGEAVHEVEVVIKHNRFTKETYDFDIAVLRLKTPITFRMNVAPACLPERDWAESTLMTQKTGIVSGFGRTHEKGRQSTRLKMLEVPYVDRNSCKLSSSFIITQNMFCAGYDTKQEDACQGDSGGPHVTRFKDTYFVTGIVSWGEGCARKGKYGIYTKVTAFLKWIDRSMKTRGLPKAKSHAPEVITSSPLK

SEQ ID NO: 153 - DNA, 1401 bp, Artificial
  Recombinant
gccaattcctttcttgaagagatgaagaaaggacacctcgaaagagagtgcatggaagagacctgctcatacgaagaggcccgcgaggtctttgaggacagcgacaagacgaatgaattctggaataaatacaaagatggcgaccagtgtgagaccagtccttgccagaaccagggcaaatgtaaagacggcctcggggaatacacctgcacctgtttagaaggattcgaaggcaaaaactgtgaattattcacacggaagctctgcagcctggacaacggggactgtgaccagttctgccacgaggaacagaactctgtggtgtgctcctgcgcccgcgggtacaccctggctgacaacggcaaggcctgcattcccacagggccctacccctgtgggaaacagaccctggaacgcaggaagaggtcagtggcccaggccaccagcagcagcggggaggcccctgacagcatcacatggaagccatatgatgcagccgacctggaccccaccgagaaccccttcgacctgcttgacttcaaccagacgcagcctgagaggggcgacaacaacctgaccagaccctctatcctgttcacccccagaatcgtgggaggccaggaatgcaaggacggggagtgtccctggcaggccctgctcatcaatgaggaaaacgagggtttctgtggtggaactattctgagcgagttctacatcctaacggcagcccactgtctctaccaagccaagagattcaaggtgagggtaggggaccggaacacggagcaggaggagggcggtgaggcggtgcacgaggtggaggtggtcatcaagcacaaccggttcacaaaggagacctatgacttcgacatcgccgtgctccggctcaagacccccatcaccttccgcatgaacgtggcgcctgcctgcctccccgagcgtgactgggccgagtccacgctgatgacgcagaagacggggattgtgagtggcttcgggcgcacccacgagaagggccggcagtccaccaggctcaagatgctggaggtgccctacgtggaccgcaacagctgcaagctgtccagcagcttcatcatcacccagaacatgttctgtgccggctacgacaccaagcaggaggatgcctgccagggggacagcgggggcccgcacgtcacccgcttcaaggacacctacttcgtgacaggcatcgtcagctggggagagggctgtgcccgtaaggggaagtacgggatctacaccaaggtcaccgccttcctcaagtggatcgacaggtccatgaaaaccaggggcttgcccaaggccaagagccatgccccggaggtcataacgtcctctccattaaaagaccaagtagatccgcggctcattgatgggaag

SEQ ID NO: 154 - protein, 467 aa, Artificial
  Recombinant
ANSFLEEMKKGHLERECMEETCSYEEAREVFEDSDKTNEFWNKYKDGDQCETSPCQNQGKCKDGLGEYTCTCLEGFEGKNCELFTRKLCSLDNGDCDQFCHEEQNSVVCSCARGYTLADNGKACIPTGPYPCGKQTLERRKRSVAQATSSSGEAPDSITWKPYDAADLDPTENPFDLLDFNQTQPERGDNNLTRPSILFTPRIVGGQECKDGECPWQALLINEENEGFCGGTILSEFYILTAAHCLYQAKRFKVRVGDRNTEQEEGGEAVHEVEVVIKHNRFTKETYDFDIAVLRLKTPITFRMNVAPACLPERDWAESTLMTQKTGIVSGFGRTHEKGRQSTRLKMLEVPYVDRNSCKLSSSFIITQNMFCAGYDTKQEDACQGDSGGPHVTRFKDTYFVTGIVSWGEGCARKGKYGIYTKVTAFLKWIDRSMKTRGLPKAKSHAPEVITSSPLKDQVDPRLIDGK

SEQ ID NO: 155 - DNA, 1368 bp, Artificial
  Recombinant
gccaattcctttcttgaagagatgaagaaaggacacctcgaaagagagtgcatggaagagacctgctcatacgaagaggcccgcgaggtctttgaggacagcgacaagacgaatgaattctggaataaatacaaagatggcgaccagtgtgagaccagtccttgccagaaccagggcaaatgtaaagacggcctcggggaatacacctgcacctgtttagaaggattcgaaggcaaaaactgtgaattattcacacggaagctctgcagcctggacaacggggactgtgaccagttctgccacgaggaacagaactctgtggtgtgctcctgcgcccgcgggtacaccctggctgacaacggcaaggcctgcattcccacagggccctacccctgtgggaaacagaccctggaacgcaggaagaggtcagtggcccaggccaccagcagcagcggggaggcccctgacagcatcacatggaagccatatgatgcagccgacctggaccccaccgagaaccccttcgacctgcttgacttcaaccagacgcagcctgagaggggcgacaacaacctgaccagaccctctatcctgttcacccccagaatcgtgggaggccaggaatgcaaggacggggagtgtccctggcaggccctgctcatcaatgaggaaaacgagggtttctgtggtggaactattctgagcgagttctacatcctaacggcagcccactgtctctaccaagccaagagattcaaggtgagggtaggggaccggaacacggagcaggaggagggcggtgaggcggtgcacgaggtggaggtggtcatcaagcacaaccggttcacaaaggagacctatgacttcgacatcgccgtgctccggctcaagacccccatcaccttccgcatgaacgtggcgcctgcctgcctccccgagcgtgactgggccgagtccacgctgatgacgcagaagacggggattgtgagtggcttcgggcgcacccacgagaagggccggcagtccaccaggctcaagatgctggaggtgccctacgtggaccgcaacagctgcaagctgtccagcagcttcatcatcacccagaacatgttctgtgccggctacgacaccaagcaggaggatgcctgccagggggacagcgggggcccgcacgtcacccgcttcaaggacacctacttcgtgacaggcatcgtcagctggggagagggctgtgcccgtaaggggaagtacgggatctacaccaaggtcaccgccttcctcaagtggatcgacaggtccatgaaaaccaggggcttgcccaaggccaagagccatgccccggaggtcataacgtcctctccattaaaa

SEQ ID NO: 156 - protein, 456 aa, Artificial
  Recombinant
ANSFLEEMKKGHLERECMEETCSYEEAREVFEDSDKTNEFWNKYKDGDQCETSPCQNQGKCKDGLGEYTCTCLEGFEGKNCELFTRKLCSLDNGDCDQFCHEEQNSVVCSCARGYTLADNGKACIPTGPYPCGKQTLERRKRSVAQATSSSGEAPDSITWKPYDAADLDPTENPFDLLDFNQTQPERGDNNLTRPSILFTPRIVGGQECKDGECPWQALLINEENEGFCGGTILSEFYILTAAHCLYQAKRFKVRVGDRNTEQEEGGEAVHEVEVVIKHNRFTKETYDFDIAVLRLKTPITFRMNVAPACLPERDWAESTLMTQKTGIVSGFGRTHEKGRQSTRLKMLEVPYVDRNSCKLSSSFIITQNMFCAGYDTKQEDACQGDSGGPHVTRFKDTYFVTGIVSWGEGCARKGKYGIYTKVTAFLKWIDRSMKTRGLPKAKSHAPEVITSSPLK

SEQ ID NO: 157 - DNA, 1401 bp, Artificial
  Recombinant
gccaattcctttcttgaagagatgaagaaaggacacctcgaaagagagtgcatggaagagacctgctcatacgaagaggcccgcgaggtctttgaggacagcgacaagacgaatgaattctggaataaatacaaagatggcgaccagtgtgagaccagtccttgccagaaccagggcaaatgtaaagacggcctcggggaatacacctgcacctgtttagaaggattcgaaggcaaaaactgtgaattattcacacggaagctctgcagcctggacaacggggactgtgaccagttctgccacgaggaacagaactctgtggtgtgctcctgcgcccgcgggtacaccctggctgacaacggcaaggcctgcattcccacagggccctacccctgtgggaaacagaccctggaacgcaggaagaggtcagtggcccaggccaccagcagcagcggggaggcccctgacagcatcacatggaagccatatgatgcagccgacctggaccccaccgagaaccccttcgacctgcttgacttcaaccagacgcagcctgagaggggcgacaacaacctgaccagaccctctatcctgttcaagcccagaatcgtgggaggccaggaatgcaaggacggggagtgtccctggcaggccctgctcatcaatgaggaaaacgagggtttctgtggtggaactattctgagcgagttctacatcctaacggcagcccactgtctctaccaagccaagagattcaaggtgagggtaggggaccggaacacggagcaggaggagggcggtgaggcggtgcacgaggtggaggtggtcatcaagcacaaccggttcacaaaggagacctatgacttcgacatcgccgtgctccggctcaagacccccatcaccttccgcatgaacgtggcgcctgcctgcctccccgagcgtgactgggccgagtccacgctgatgacgcagaagacggggattgtgagtggcttcgggcgcacccacgagaagggccggcagtccaccaggctcaagatgctggaggtgccctacgtggaccgcaacagctgcaagctgtccagcagcttcatcatcacccagaacatgttctgtgccggctacgacaccaagcaggaggatgcctgccagggggacagcgggggcccgcacgtcacccgcttcaaggacacctacttcgtgacaggcatcgtcagctggggagagggctgtgcccgtaaggggaagtacgggatctacaccaaggtcaccgccttcctcaagtggatcgacaggtccatgaaaaccaggggcttgcccaaggccaagagccatgccccggaggtcataacgtcctctccattaaaagaccaagtagatccgcggctcattgatgggaag

SEQ ID NO: 158 - protein, 467 aa, Artificial
  Recombinant
ANSFLEEMKKGHLERECMEETCSYEEAREVFEDSDKTNEFWNKYKDGDQCETSPCQNQGKCKDGLGEYTCTCLEGFEGKNCELFTRKLCSLDNGDCDQFCHEEQNSVVCSCARGYTLADNGKACIPTGPYPCGKQTLERRKRSVAQATSSSGEAPDSITWKPYDAADLDPTENPFDLLDFNQTQPERGDNNLTRPSILFKPRIVGGQECKDGECPWQALLINEENEGFCGGTILSEFYILTAAHCLYQAKRFKVRVGDRNTEQEEGGEAVHEVEVVIKHNRFTKETYDFDIAVLRLKTPITFRMNVAPACLPERDWAESTLMTQKTGIVSGFGRTHEKGRQSTRLKMLEVPYVDRNSCKLSSSFIITQNMFCAGYDTKQEDACQGDSGGPHVTRFKDTYFVTGIVSWGEGCARKGKYGIYTKVTAFLKWIDRSMKTRGLPKAKSHAPEVITSSPLKDQVDPRLIDGK

SEQ ID NO: 159 - DNA, 1368 bp, Artificial
  Recombinant
gccaattcctttcttgaagagatgaagaaaggacacctcgaaagagagtgcatggaagagacctgctcatacgaagaggcccgcgaggtctttgaggacagcgacaagacgaatgaattctggaataaatacaaagatggcgaccagtgtgagaccagtccttgccagaaccagggcaaatgtaaagacggcctcggggaatacacctgcacctgtttagaaggattcgaaggcaaaaactgtgaattattcacacggaagctctgcagcctggacaacggggactgtgaccagttctgccacgaggaacagaactctgtggtgtgctcctgcgcccgcgggtacaccctggctgacaacggcaaggcctgcattcccacagggccctacccctgtgggaaacagaccctggaacgcaggaagaggtcagtggcccaggccaccagcagcagcggggaggcccctgacagcatcacatggaagccatatgatgcagccgacctggaccccaccgagaaccccttcgacctgcttgacttcaaccagacgcagcctgagaggggcgacaacaacctgaccagaccctctatcctgttcaagcccagaatcgtgggaggccaggaatgcaaggacggggagtgtccctggcaggccctgctcatcaatgaggaaaacgagggtttctgtggtggaactattctgagcgagttctacatcctaacggcagcccactgtctctaccaagccaagagattcaaggtgagggtaggggaccggaacacggagcaggaggagggcggtgaggcggtgcacgaggtggaggtggtcatcaagcacaaccggttcacaaaggagacctatgacttcgacatcgccgtgctccggctcaagacccccatcaccttccgcatgaacgtggcgcctgcctgcctccccgagcgtgactgggccgagtccacgctgatgacgcagaagacggggattgtgagtggcttcgggcgcacccacgagaagggccggcagtccaccaggctcaagatgctggaggtgccctacgtggaccgcaacagctgcaagctgtccagcagcttcatcatcacccagaacatgttctgtgccggctacgacaccaagcaggaggatgcctgccagggggacagcgggggcccgcacgtcacccgcttcaaggacacctacttcgtgacaggcatcgtcagctggggagagggctgtgcccgtaaggggaagtacgggatctacaccaaggtcaccgccttcctcaagtggatcgacaggtccatgaaaaccaggggcttgcccaaggccaagagccatgccccggaggtcataacgtcctctccattaaaa

SEQ ID NO: 160 - protein, 456 aa, Artificial
  Recombinant
ANSFLEEMKKGHLERECMEETCSYEEAREVFEDSDKTNEFWNKYKDGDQCETSPCQNQGKCKDGLGEYTCTCLEGFEGKNCELFTRKLCSLDNGDCDQFCHEEQNSVVCSCARGYTLADNGKACIPTGPYPCGKQTLERRKRSVAQATSSSGEAPDSITWKPYDAADLDPTENPFDLLDFNQTQPERGDNNLTRPSILFKPRIVGGQECKDGECPWQALLINEENEGFCGGTILSEFYILTAAHCLYQAKRFKVRVGDRNTEQEEGGEAVHEVEVVIKHNRFTKETYDFDIAVLRLKTPITFRMNVAPACLPERDWAESTLMTQKTGIVSGFGRTHEKGRQSTRLKMLEVPYVDRNSCKLSSSFIITQNMFCAGYDTKQEDACQGDSGGPHVTRFKDTYFVTGIVSWGEGCARKGKYGIYTKVTAFLKWIDRSMKTRGLPKAKSHAPEVITSSPLK

SEQ ID NO: 161 - DNA, 1401 bp, Artificial
  Recombinant
gccaattcctttcttgaagagatgaagaaaggacacctcgaaagagagtgcatggaagagacctgctcatacgaagaggcccgcgaggtctttgaggacagcgacaagacgaatgaattctggaataaatacaaagatggcgaccagtgtgagaccagtccttgccagaaccagggcaaatgtaaagacggcctcggggaatacacctgcacctgtttagaaggattcgaaggcaaaaactgtgaattattcacacggaagctctgcagcctggacaacggggactgtgaccagttctgccacgaggaacagaactctgtggtgtgctcctgcgcccgcgggtacaccctggctgacaacggcaaggcctgcattcccacagggccctacccctgtgggaaacagaccctggaacgcaggaagaggtcagtggcccaggccaccagcagcagcggggaggcccctgacagcatcacatggaagccatatgatgcagccgacctggaccccaccgagaaccccttcgacctgcttgacttcaaccagacgcagcctgagaggggcgacaacaacctgaccagaccctctatcctgatgaagcccagaatcgtgggaggccaggaatgcaaggacggggagtgtccctggcaggccctgctcatcaatgaggaaaacgagggtttctgtggtggaactattctgagcgagttctacatcctaacggcagcccactgtctctaccaagccaagagattcaaggtgagggtaggggaccggaacacggagcaggaggagggcggtgaggcggtgcacgaggtggaggtggtcatcaagcacaaccggttcacaaaggagacctatgacttcgacatcgccgtgctccggctcaagacccccatcaccttccgcatgaacgtggcgcctgcctgcctccccgagcgtgactgggccgagtccacgctgatgacgcagaagacggggattgtgagtggcttcgggcgcacccacgagaagggccggcagtccaccaggctcaagatgctggaggtgccctacgtggaccgcaacagctgcaagctgtccagcagcttcatcatcacccagaacatgttctgtgccggctacgacaccaagcaggaggatgcctgccagggggacagcgggggcccgcacgtcacccgcttcaaggacacctacttcgtgacaggcatcgtcagctggggagagggctgtgcccgtaaggggaagtacgggatctacaccaaggtcaccgccttcctcaagtggatcgacaggtccatgaaaaccaggggcttgcccaaggccaagagccatgccccggaggtcataacgtcctctccattaaaagaccaagtagatccgcggctcattgatgggaag

SEQ ID NO: 162 - protein, 467 aa, Artificial
  Recombinant
ANSFLEEMKKGHLERECMEETCSYEEAREVFEDSDKTNEFWNKYKDGDQCETSPCQNQGKCKDGLGEYTCTCLEGFEGKNCELFTRKLCSLDNGDCDQFCHEEQNSVVCSCARGYTLADNGKACIPTGPYPCGKQTLERRKRSVAQATSSSGEAPDSITWKPYDAADLDPTENPFDLLDFNQTQPERGDNNLTRPSILMKPRIVGGQECKDGECPWQALLINEENEGFCGGTILSEFYILTAAHCLYQAKRFKVRVGDRNTEQEEGGEAVHEVEVVIKHNRFTKETYDFDIAVLRLKTPITFRMNVAPACLPERDWAESTLMTQKTGIVSGFGRTHEKGRQSTRLKMLEVPYVDRNSCKLSSSFIITQNMFCAGYDTKQEDACQGDSGGPHVTRFKDTYFVTGIVSWGEGCARKGKYGIYTKVTAFLKWIDRSMKTRGLPKAKSHAPEVITSSPLKDQVDPRLIDGK

SEQ ID NO: 163 - DNA, 1368 bp, Artificial
  Recombinant
gccaattcctttcttgaagagatgaagaaaggacacctcgaaagagagtgcatggaagagacctgctcatacgaagaggcccgcgaggtctttgaggacagcgacaagacgaatgaattctggaataaatacaaagatggcgaccagtgtgagaccagtccttgccagaaccagggcaaatgtaaagacggcctcggggaatacacctgcacctgtttagaaggattcgaaggcaaaaactgtgaattattcacacggaagctctgcagcctggacaacggggactgtgaccagttctgccacgaggaacagaactctgtggtgtgctcctgcgcccgcgggtacaccctggctgacaacggcaaggcctgcattcccacagggccctacccctgtgggaaacagaccctggaacgcaggaagaggtcagtggcccaggccaccagcagcagcggggaggcccctgacagcatcacatggaagccatatgatgcagccgacctggaccccaccgagaaccccttcgacctgcttgacttcaaccagacgcagcctgagaggggcgacaacaacctgaccagaccctctatcctgatgaagcccagaatcgtgggaggccaggaatgcaaggacggggagtgtccctggcaggccctgctcatcaatgaggaaaacgagggtttctgtggtggaactattctgagcgagttctacatcctaacggcagcccactgtctctaccaagccaagagattcaaggtgagggtaggggaccggaacacggagcaggaggagggcggtgaggcggtgcacgaggtggaggtggtcatcaagcacaaccggttcacaaaggagacctatgacttcgacatcgccgtgctccggctcaagacccccatcaccttccgcatgaacgtggcgcctgcctgcctccccgagcgtgactgggccgagtccacgctgatgacgcagaagacggggattgtgagtggcttcgggcgcacccacgagaagggccggcagtccaccaggctcaagatgctggaggtgccctacgtggaccgcaacagctgcaagctgtccagcagcttcatcatcacccagaacatgttctgtgccggctacgacaccaagcaggaggatgcctgccagggggacagcgggggcccgcacgtcacccgcttcaaggacacctacttcgtgacaggcatcgtcagctggggagagggctgtgcccgtaaggggaagtacgggatctacaccaaggtcaccgccttcctcaagtggatcgacaggtccatgaaaaccaggggcttgcccaaggccaagagccatgccccggaggtcataacgtcctctccattaaaa

SEQ ID NO: 164 - protein, 456 aa, Artificial
  Recombinant
ANSFLEEMKKGHLERECMEETCSYEEAREVFEDSDKTNEFWNKYKDGDQCETSPCQNQGKCKDGLGEYTCTCLEGFEGKNCELFTRKLCSLDNGDCDQFCHEEQNSVVCSCARGYTLADNGKACIPTGPYPCGKQTLERRKRSVAQATSSSGEAPDSITWKPYDAADLDPTENPFDLLDFNQTQPERGDNNLTRPSILMKPRIVGGQECKDGECPWQALLINEENEGFCGGTILSEFYILTAAHCLYQAKRFKVRVGDRNTEQEEGGEAVHEVEVVIKHNRFTKETYDFDIAVLRLKTPITFRMNVAPACLPERDWAESTLMTQKTGIVSGFGRTHEKGRQSTRLKMLEVPYVDRNSCKLSSSFIITQNMFCAGYDTKQEDACQGDSGGPHVTRFKDTYFVTGIVSWGEGCARKGKYGIYTKVTAFLKWIDRSMKTRGLPKAKSHAPEVITSSPLK

SEQ ID NO: 165 - DNA, 1401 bp, Artificial
  Recombinant
gccaattcctttcttgaagagatgaagaaaggacacctcgaaagagagtgcatggaagagacctgctcatacgaagaggcccgcgaggtctttgaggacagcgacaagacgaatgaattctggaataaatacaaagatggcgaccagtgtgagaccagtccttgccagaaccagggcaaatgtaaagacggcctcggggaatacacctgcacctgtttagaaggattcgaaggcaaaaactgtgaattattcacacggaagctctgcagcctggacaacggggactgtgaccagttctgccacgaggaacagaactctgtggtgtgctcctgcgcccgcgggtacaccctggctgacaacggcaaggcctgcattcccacagggccctacccctgtgggaaacagaccctggaacgcaggaagaggtcagtggcccaggccaccagcagcagcggggaggcccctgacagcatcacatggaagccatatgatgcagccgacctggaccccaccgagaaccccttcgacctgcttgacttcaaccagacgcagcctgagaggggcgacaacaacctgaccagaccctctatcctgtggcagcccagaatcgtgggaggccaggaatgcaaggacggggagtgtccctggcaggccctgctcatcaatgaggaaaacgagggtttctgtggtggaactattctgagcgagttctacatcctaacggcagcccactgtctctaccaagccaagagattcaaggtgagggtaggggaccggaacacggagcaggaggagggcggtgaggcggtgcacgaggtggaggtggtcatcaagcacaaccggttcacaaaggagacctatgacttcgacatcgccgtgctccggctcaagacccccatcaccttccgcatgaacgtggcgcctgcctgcctccccgagcgtgactgggccgagtccacgctgatgacgcagaagacggggattgtgagtggcttcgggcgcacccacgagaagggccggcagtccaccaggctcaagatgctggaggtgccctacgtggaccgcaacagctgcaagctgtccagcagcttcatcatcacccagaacatgttctgtgccggctacgacaccaagcaggaggatgcctgccagggggacagcgggggcccgcacgtcacccgcttcaaggacacctacttcgtgacaggcatcgtcagctggggagagggctgtgcccgtaaggggaagtacgggatctacaccaaggtcaccgccttcctcaagtggatcgacaggtccatgaaaaccaggggcttgcccaaggccaagagccatgccccggaggtcataacgtcctctccattaaaagaccaagtagatccgcggctcattgatgggaag

SEQ ID NO: 166 - protein, 467 aa, Artificial
  Recombinant
ANSFLEEMKKGHLERECMEETCSYEEAREVFEDSDKTNEFWNKYKDGDQCETSPCQNQGKCKDGLGEYTCTCLEGFEGKNCELFTRKLCSLDNGDCDQFCHEEQNSVVCSCARGYTLADNGKACIPTGPYPCGKQTLERRKRSVAQATSSSGEAPDSITWKPYDAADLDPTENPFDLLDFNQTQPERGDNNLTRPSILWQPRIVGGQECKDGECPWQALLINEENEGFCGGTILSEFYILTAAHCLYQAKRFKVRVGDRNTEQEEGGEAVHEVEVVIKHNRFTKETYDFDIAVLRLKTPITFRMNVAPACLPERDWAESTLMTQKTGIVSGFGRTHEKGRQSTRLKMLEVPYVDRNSCKLSSSFIITQNMFCAGYDTKQEDACQGDSGGPHVTRFKDTYFVTGIVSWGEGCARKGKYGIYTKVTAFLKWIDRSMKTRGLPKAKSHAPEVITSSPLKDQVDPRLIDGK

SEQ ID NO: 167 - DNA, 1368 bp, Artificial
  Recombinant
gccaattcctttcttgaagagatgaagaaaggacacctcgaaagagagtgcatggaagagacctgctcatacgaagaggcccgcgaggtctttgaggacagcgacaagacgaatgaattctggaataaatacaaagatggcgaccagtgtgagaccagtccttgccagaaccagggcaaatgtaaagacggcctcggggaatacacctgcacctgtttagaaggattcgaaggcaaaaactgtgaattattcacacggaagctctgcagcctggacaacggggactgtgaccagttctgccacgaggaacagaactctgtggtgtgctcctgcgcccgcgggtacaccctggctgacaacggcaaggcctgcattcccacagggccctacccctgtgggaaacagaccctggaacgcaggaagaggtcagtggcccaggccaccagcagcagcggggaggcccctgacagcatcacatggaagccatatgatgcagccgacctggaccccaccgagaaccccttcgacctgcttgacttcaaccagacgcagcctgagaggggcgacaacaacctgaccagaccctctatcctgtggcagcccagaatcgtgggaggccaggaatgcaaggacggggagtgtccctggcaggccctgctcatcaatgaggaaaacgagggtttctgtggtggaactattctgagcgagttctacatcctaacggcagcccactgtctctaccaagccaagagattcaaggtgagggtaggggaccggaacacggagcaggaggagggcggtgaggcggtgcacgaggtggaggtggtcatcaagcacaaccggttcacaaaggagacctatgacttcgacatcgccgtgctccggctcaagacccccatcaccttccgcatgaacgtggcgcctgcctgcctccccgagcgtgactgggccgagtccacgctgatgacgcagaagacggggattgtgagtggcttcgggcgcacccacgagaagggccggcagtccaccaggctcaagatgctggaggtgccctacgtggaccgcaacagctgcaagctgtccagcagcttcatcatcacccagaacatgttctgtgccggctacgacaccaagcaggaggatgcctgccagggggacagcgggggcccgcacgtcacccgcttcaaggacacctacttcgtgacaggcatcgtcagctggggagagggctgtgcccgtaaggggaagtacgggatctacaccaaggtcaccgccttcctcaagtggatcgacaggtccatgaaaaccaggggcttgcccaaggccaagagccatgccccggaggtcataacgtcctctccattaaaa

SEQ ID NO: 168 - protein, 456 aa, Artificial
  Recombinant
ANSFLEEMKKGHLERECMEETCSYEEAREVFEDSDKTNEFWNKYKDGDQCETSPCQNQGKCKDGLGEYTCTCLEGFEGKNCELFTRKLCSLDNGDCDQFCHEEQNSVVCSCARGYTLADNGKACIPTGPYPCGKQTLERRKRSVAQATSSSGEAPDSITWKPYDAADLDPTENPFDLLDFNQTQPERGDNNLTRPSILWQPRIVGGQECKDGECPWQALLINEENEGFCGGTILSEFYILTAAHCLYQAKRFKVRVGDRNTEQEEGGEAVHEVEVVIKHNRFTKETYDFDIAVLRLKTPITFRMNVAPACLPERDWAESTLMTQKTGIVSGFGRTHEKGRQSTRLKMLEVPYVDRNSCKLSSSFIITQNMFCAGYDTKQEDACQGDSGGPHVTRFKDTYFVTGIVSWGEGCARKGKYGIYTKVTAFLKWIDRSMKTRGLPKAKSHAPEVITSSPLK

SEQ ID NO: 169 - DNA, 1401 bp, Artificial
  Recombinant
gccaattcctttcttgaagagatgaagaaaggacacctcgaaagagagtgcatggaagagacctgctcatacgaagaggcccgcgaggtctttgaggacagcgacaagacgaatgaattctggaataaatacaaagatggcgaccagtgtgagaccagtccttgccagaaccagggcaaatgtaaagacggcctcggggaatacacctgcacctgtttagaaggattcgaaggcaaaaactgtgaattattcacacggaagctctgcagcctggacaacggggactgtgaccagttctgccacgaggaacagaactctgtggtgtgctcctgcgcccgcgggtacaccctggctgacaacggcaaggcctgcattcccacagggccctacccctgtgggaaacagaccctggaacgcaggaagaggtcagtggcccaggccaccagcagcagcggggaggcccctgacagcatcacatggaagccatatgatgcagccgacctggaccccaccgagaaccccttcgacctgcttgacttcaaccagacgcagcctgagaggggcgacaacaacctgaccagaccctctatcctgctgaggcccagaatcgtgggaggccaggaatgcaaggacggggagtgtccctggcaggccctgctcatcaatgaggaaaacgagggtttctgtggtggaactattctgagcgagttctacatcctaacggcagcccactgtctctaccaagccaagagattcaaggtgagggtaggggaccggaacacggagcaggaggagggcggtgaggcggtgcacgaggtggaggtggtcatcaagcacaaccggttcacaaaggagacctatgacttcgacatcgccgtgctccggctcaagacccccatcaccttccgcatgaacgtggcgcctgcctgcctccccgagcgtgactgggccgagtccacgctgatgacgcagaagacggggattgtgagtggcttcgggcgcacccacgagaagggccggcagtccaccaggctcaagatgctggaggtgccctacgtggaccgcaacagctgcaagctgtccagcagcttcatcatcacccagaacatgttctgtgccggctacgacaccaagcaggaggatgcctgccagggggacagcgggggcccgcacgtcacccgcttcaaggacacctacttcgtgacaggcatcgtcagctggggagagggctgtgcccgtaaggggaagtacgggatctacaccaaggtcaccgccttcctcaagtggatcgacaggtccatgaaaaccaggggcttgcccaaggccaagagccatgccccggaggtcataacgtcctctccattaaaagaccaagtagatccgcggctcattgatgggaag

SEQ ID NO: 170 - protein, 467 aa, Artificial
  Recombinant
ANSFLEEMKKGHLERECMEETCSYEEAREVFEDSDKTNEFWNKYKDGDQCETSPCQNQGKCKDGLGEYTCTCLEGFEGKNCELFTRKLCSLDNGDCDQFCHEEQNSVVCSCARGYTLADNGKACIPTGPYPCGKQTLERRKRSVAQATSSSGEAPDSITWKPYDAADLDPTENPFDLLDFNQTQPERGDNNLTRPSILLRPRIVGGQECKDGECPWQALLINEENEGFCGGTILSEFYILTAAHCLYQAKRFKVRVGDRNTEQEEGGEAVHEVEVVIKHNRFTKETYDFDIAVLRLKTPITFRMNVAPACLPERDWAESTLMTQKTGIVSGFGRTHEKGRQSTRLKMLEVPYVDRNSCKLSSSFIITQNMFCAGYDTKQEDACQGDSGGPHVTRFKDTYFVTGIVSWGEGCARKGKYGIYTKVTAFLKWIDRSMKTRGLPKAKSHAPEVITSSPLKDQVDPRLIDGK

SEQ ID NO: 171 - DNA, 1368 bp, Artificial
  Recombinant
gccaattcctttcttgaagagatgaagaaaggacacctcgaaagagagtgcatggaagagacctgctcatacgaagaggcccgcgaggtctttgaggacagcgacaagacgaatgaattctggaataaatacaaagatggcgaccagtgtgagaccagtccttgccagaaccagggcaaatgtaaagacggcctcggggaatacacctgcacctgtttagaaggattcgaaggcaaaaactgtgaattattcacacggaagctctgcagcctggacaacggggactgtgaccagttctgccacgaggaacagaactctgtggtgtgctcctgcgcccgcgggtacaccctggctgacaacggcaaggcctgcattcccacagggccctacccctgtgggaaacagaccctggaacgcaggaagaggtcagtggcccaggccaccagcagcagcggggaggcccctgacagcatcacatggaagccatatgatgcagccgacctggaccccaccgagaaccccttcgacctgcttgacttcaaccagacgcagcctgagaggggcgacaacaacctgaccagaccctctatcctgctgaggcccagaatcgtgggaggccaggaatgcaaggacggggagtgtccctggcaggccctgctcatcaatgaggaaaacgagggtttctgtggtggaactattctgagcgagttctacatcctaacggcagcccactgtctctaccaagccaagagattcaaggtgagggtaggggaccggaacacggagcaggaggagggcggtgaggcggtgcacgaggtggaggtggtcatcaagcacaaccggttcacaaaggagacctatgacttcgacatcgccgtgctccggctcaagacccccatcaccttccgcatgaacgtggcgcctgcctgcctccccgagcgtgactgggccgagtccacgctgatgacgcagaagacggggattgtgagtggcttcgggcgcacccacgagaagggccggcagtccaccaggctcaagatgctggaggtgccctacgtggaccgcaacagctgcaagctgtccagcagcttcatcatcacccagaacatgttctgtgccggctacgacaccaagcaggaggatgcctgccagggggacagcgggggcccgcacgtcacccgcttcaaggacacctacttcgtgacaggcatcgtcagctggggagagggctgtgcccgtaaggggaagtacgggatctacaccaaggtcaccgccttcctcaagtggatcgacaggtccatgaaaaccaggggcttgcccaaggccaagagccatgccccggaggtcataacgtcctctccattaaaa

SEQ ID NO: 172 - protein, 456 aa, Artificial
  Recombinant
ANSFLEEMKKGHLERECMEETCSYEEAREVFEDSDKTNEFWNKYKDGDQCETSPCQNQGKCKDGLGEYTCTCLEGFEGKNCELFTRKLCSLDNGDCDQFCHEEQNSVVCSCARGYTLADNGKACIPTGPYPCGKQTLERRKRSVAQATSSSGEAPDSITWKPYDAADLDPTENPFDLLDFNQTQPERGDNNLTRPSILLRPRIVGGQECKDGECPWQALLINEENEGFCGGTILSEFYILTAAHCLYQAKRFKVRVGDRNTEQEEGGEAVHEVEVVIKHNRFTKETYDFDIAVLRLKTPITFRMNVAPACLPERDWAESTLMTQKTGIVSGFGRTHEKGRQSTRLKMLEVPYVDRNSCKLSSSFIITQNMFCAGYDTKQEDACQGDSGGPHVTRFKDTYFVTGIVSWGEGCARKGKYGIYTKVTAFLKWIDRSMKTRGLPKAKSHAPEVITSSPLK

SEQ ID NO: 173 - DNA, 1401 bp, Artificial
  Recombinant
gccaattcctttcttgaagagatgaagaaaggacacctcgaaagagagtgcatggaagagacctgctcatacgaagaggcccgcgaggtctttgaggacagcgacaagacgaatgaattctggaataaatacaaagatggcgaccagtgtgagaccagtccttgccagaaccagggcaaatgtaaagacggcctcggggaatacacctgcacctgtttagaaggattcgaaggcaaaaactgtgaattattcacacggaagctctgcagcctggacaacggggactgtgaccagttctgccacgaggaacagaactctgtggtgtgctcctgcgcccgcgggtacaccctggctgacaacggcaaggcctgcattcccacagggccctacccctgtgggaaacagaccctggaacgcaggaagaggtcagtggcccaggccaccagcagcagcggggaggcccctgacagcatcacatggaagccatatgatgcagccgacctggaccccaccgagaaccccttcgacctgcttgacttcaaccagacgcagcctgagaggggcgacaacaacctgaccagaccctctatcctgatgacccccagaatcgtgggaggccaggaatgcaaggacggggagtgtccctggcaggccctgctcatcaatgaggaaaacgagggtttctgtggtggaactattctgagcgagttctacatcctaacggcagcccactgtctctaccaagccaagagattcaaggtgagggtaggggaccggaacacggagcaggaggagggcggtgaggcggtgcacgaggtggaggtggtcatcaagcacaaccggttcacaaaggagacctatgacttcgacatcgccgtgctccggctcaagacccccatcaccttccgcatgaacgtggcgcctgcctgcctccccgagcgtgactgggccgagtccacgctgatgacgcagaagacggggattgtgagtggcttcgggcgcacccacgagaagggccggcagtccaccaggctcaagatgctggaggtgccctacgtggaccgcaacagctgcaagctgtccagcagcttcatcatcacccagaacatgttctgtgccggctacgacaccaagcaggaggatgcctgccagggggacagcgggggcccgcacgtcacccgcttcaaggacacctacttcgtgacaggcatcgtcagctggggagagggctgtgcccgtaaggggaagtacgggatctacaccaaggtcaccgccttcctcaagtggatcgacaggtccatgaaaaccaggggcttgcccaaggccaagagccatgccccggaggtcataacgtcctctccattaaaagaccaagtagatccgcggctcattgatgggaag

SEQ ID NO: 174 - protein, 467 aa, Artificial
  Recombinant
ANSFLEEMKKGHLERECMEETCSYEEAREVFEDSDKTNEFWNKYKDGDQCETSPCQNQGKCKDGLGEYTCTCLEGFEGKNCELFTRKLCSLDNGDCDQFCHEEQNSVVCSCARGYTLADNGKACIPTGPYPCGKQTLERRKRSVAQATSSSGEAPDSITWKPYDAADLDPTENPFDLLDFNQTQPERGDNNLTRPSILMTPRIVGGQECKDGECPWQALLINEENEGFCGGTILSEFYILTAAHCLYQAKRFKVRVGDRNTEQEEGGEAVHEVEVVIKHNRFTKETYDFDIAVLRLKTPITFRMNVAPACLPERDWAESTLMTQKTGIVSGFGRTHEKGRQSTRLKMLEVPYVDRNSCKLSSSFIITQNMFCAGYDTKQEDACQGDSGGPHVTRFKDTYFVTGIVSWGEGCARKGKYGIYTKVTAFLKWIDRSMKTRGLPKAKSHAPEVITSSPLKDQVDPRLIDGK

SEQ ID NO: 175 - DNA, 1368 bp, Artificial
  Recombinant
gccaattcctttcttgaagagatgaagaaaggacacctcgaaagagagtgcatggaagagacctgctcatacgaagaggcccgcgaggtctttgaggacagcgacaagacgaatgaattctggaataaatacaaagatggcgaccagtgtgagaccagtccttgccagaaccagggcaaatgtaaagacggcctcggggaatacacctgcacctgtttagaaggattcgaaggcaaaaactgtgaattattcacacggaagctctgcagcctggacaacggggactgtgaccagttctgccacgaggaacagaactctgtggtgtgctcctgcgcccgcgggtacaccctggctgacaacggcaaggcctgcattcccacagggccctacccctgtgggaaacagaccctggaacgcaggaagaggtcagtggcccaggccaccagcagcagcggggaggcccctgacagcatcacatggaagccatatgatgcagccgacctggaccccaccgagaaccccttcgacctgcttgacttcaaccagacgcagcctgagaggggcgacaacaacctgaccagaccctctatcctgatgacccccagaatcgtgggaggccaggaatgcaaggacggggagtgtccctggcaggccctgctcatcaatgaggaaaacgagggtttctgtggtggaactattctgagcgagttctacatcctaacggcagcccactgtctctaccaagccaagagattcaaggtgagggtaggggaccggaacacggagcaggaggagggcggtgaggcggtgcacgaggtggaggtggtcatcaagcacaaccggttcacaaaggagacctatgacttcgacatcgccgtgctccggctcaagacccccatcaccttccgcatgaacgtggcgcctgcctgcctccccgagcgtgactgggccgagtccacgctgatgacgcagaagacggggattgtgagtggcttcgggcgcacccacgagaagggccggcagtccaccaggctcaagatgctggaggtgccctacgtggaccgcaacagctgcaagctgtccagcagcttcatcatcacccagaacatgttctgtgccggctacgacaccaagcaggaggatgcctgccagggggacagcgggggcccgcacgtcacccgcttcaaggacacctacttcgtgacaggcatcgtcagctggggagagggctgtgcccgtaaggggaagtacgggatctacaccaaggtcaccgccttcctcaagtggatcgacaggtccatgaaaaccaggggcttgcccaaggccaagagccatgccccggaggtcataacgtcctctccattaaaa

SEQ ID NO: 176 - protein, 456 aa, Artificial
  Recombinant
ANSFLEEMKKGHLERECMEETCSYEEAREVFEDSDKTNEFWNKYKDGDQCETSPCQNQGKCKDGLGEYTCTCLEGFEGKNCELFTRKLCSLDNGDCDQFCHEEQNSVVCSCARGYTLADNGKACIPTGPYPCGKQTLERRKRSVAQATSSSGEAPDSITWKPYDAADLDPTENPFDLLDFNQTQPERGDNNLTRPSILMTPRIVGGQECKDGECPWQALLINEENEGFCGGTILSEFYILTAAHCLYQAKRFKVRVGDRNTEQEEGGEAVHEVEVVIKHNRFTKETYDFDIAVLRLKTPITFRMNVAPACLPERDWAESTLMTQKTGIVSGFGRTHEKGRQSTRLKMLEVPYVDRNSCKLSSSFIITQNMFCAGYDTKQEDACQGDSGGPHVTRFKDTYFVTGIVSWGEGCARKGKYGIYTKVTAFLKWIDRSMKTRGLPKAKSHAPEVITSSPLK

SEQ ID NO: 177 - DNA, 1269 bp, Artificial
  Recombinant
gaccagtgtgagaccagtccttgccagaaccagggcaaatgtaaagacggcctcggggaatacacctgtacctgtttagaaggattcgaaggcaaaaactgtgaattattcacacggaagctctgcagcctggacaacggggactgtgaccagttctgccacgaggaacagaactctgtggtgtgctcctgcgcccgcgggtacaccctggctgacaacggcaaggcctgcattcccacagggccctacccctgtgggaaacagaccctggaacgcaggaagaggtcagtggcccaggccaccagcagcagcggggaggcccctgacagcatcacatggaagccatatgatgcagccgacctggaccccaccgagaaccccttcgacctgcttgacttcaaccagacgcagcctgagaggggcgacaacaacctcaccaggagcgagtaccagaccttcttcaaccccagaatcgtgggaggccaggaatgcaaggacggggagtgtccctggcaggccctgctcatcaatgaggaaaacgagggtttctgtggtggaactattctgagcgagttctacatcctaacggcagcccactgtctctaccaagccaagagattcaaggtgagggtaggggaccggaacacggagcaggaggagggcggtgaggcggtgcacgaggtggaggtggtcatcaagcacaaccggttcacaaaggagacctatgacttcgacatcgccgtgctccggctcaagacccccatcaccttccgcatgaacgtggcgcctgcctgcctccccgagcgtgactgggccgagtccacgctgatgacgcagaagacggggattgtgagtggcttcgggcgcacccacgagaagggccggcagtccaccaggctcaagatgctggaggtgccctacgtggaccgcaacagctgcaagctgtccagcagcttcatcatcacccagaacatgttctgtgccggctacgacaccaagcaggaggatgcctgccagggggacagcgggggcccgcacgtcacccgcttcaaggacacctacttcgtgacaggcatcgtcagctggggagagggctgtgcccgtaaggggaagtacgggatctacaccaaggtcaccgccttcctcaagtggatcgacaggtccatgaaaaccaggggcttgcccaaggccaagagccatgccccggaggtcataacgtcctctccattaaaggaggaccaagtagatccgcggctcattgatgggaag

SEQ ID NO: 178 - protein, 423 aa, Artificial
  Recombinant
DQCETSPCQNQGKCKDGLGEYTCTCLEGFEGKNCELFTRKLCSLDNGDCDQFCHEEQNSVVCSCARGYTLADNGKACIPTGPYPCGKQTLERRKRSVAQATSSSGEAPDSITWKPYDAADLDPTENPFDLLDFNQTQPERGDNNLTRSEYQTFFNPRIVGGQECKDGECPWQALLINEENEGFCGGTILSEFYILTAAHCLYQAKRFKVRVGDRNTEQEEGGEAVHEVEVVIKHNRFTKETYDFDIAVLRLKTPITFRMNVAPACLPERDWAESTLMTQKTGIVSGFGRTHEKGRQSTRLKMLEVPYVDRNSCKLSSSFIITQNMFCAGYDTKQEDACQGDSGGPHVTRFKDTYFVTGIVSWGEGCARKGKYGIYTKVTAFLKWIDRSMKTRGLPKAKSHAPEVITSSPLKEDQVDPRLIDGK

SEQ ID NO: 179 - DNA, 1374 bp, Artificial
  Recombinant
gccaattcctttcttgaagagatgaagaaaggacacctcgaaagagagtgcatggaagagacctgctcatacgaagaggcccgcgaggtctttgaggacagcgacaagacgaatgaattctggaataaatacaaagatggcgaccagtgtgagaccagtccttgccagaaccagggcaaatgtaaagacggcctcggggaatacacctgtacctgtttagaaggattcgaaggcaaaaactgtgaattattcacacggaagctctgcagcctggacaacggggactgtgaccagttctgccacgaggaacagaactctgtggtgtgctcctgcgcccgcgggtacaccctggctgacaacggcaaggcctgcattcccacagggccctacccctgtgggaaacagaccctggaacgcaggaagaggtcagtggcccaggccaccagcagcagcggggaggcccctgacagcatcacatggaagccatatgatgcagccgacctggaccccaccgagaaccccttcgacctgcttgacttcaaccagacgcagcctgagaggggcgacaacaacctcaccaggagcgagtaccagaccttcttcaaccccagaatcgtgggaggccaggaatgcaaggacggggagtgtccctggcaggccctgctcatcaatgaggaaaacgagggtttctgtggtggaactattctgagcgagttctacatcctaacggcagcccactgtctctaccaagccaagagattcaaggtgagggtaggggaccggaacacggagcaggaggagggcggtgaggcggtgcacgaggtggaggtggtcatcaagcacaaccggttcacaaaggagacctatgacttcgacatcgccgtgctccggctcaagacccccatcaccttccgcatgaacgtggcgcctgcctgcctccccgagcgtgactgggccgagtccacgctgatgacgcagaagacggggattgtgagtggcttcgggcgcacccacgagaagggccggcagtccaccaggctcaagatgctggaggtgccctacgtggaccgcaacagctgcaagctgtccagcagcttcatcatcacccagaacatgttctgtgccggctacgacaccaagcaggaggatgcctgccagggggacagcgggggcccgcacgtcacccgcttcaaggacacctacttcgtgacaggcatcgtcagctggggagagggctgtgcccgtaaggggaagtacgggatctacaccaaggtcaccgccttcctcaagtggatcgacaggtccatgaaaaccaggggcttgcccaaggccaagagccatgccccggaggtcataacgtcctctccattaaag

SEQ ID NO: 180 - protein, 458 aa, Artificial
  Recombinant
ANSFLEEMKKGHLERECMEETCSYEEAREVFEDSDKTNEFWNKYKDGDQCETSPCQNQGKCKDGLGEYTCTCLEGFEGKNCELFTRKLCSLDNGDCDQFCHEEQNSVVCSCARGYTLADNGKACIPTGPYPCGKQTLERRKRSVAQATSSSGEAPDSITWKPYDAADLDPTENPFDLLDFNQTQPERGDNNLTRSEYQTFFNPRIVGGQECKDGECPWQALLINEENEGFCGGTILSEFYILTAAHCLYQAKRFKVRVGDRNTEQEEGGEAVHEVEVVIKHNRFTKETYDFDIAVLRLKTPITFRMNVAPACLPERDWAESTLMTQKTGIVSGFGRTHEKGRQSTRLKMLEVPYVDRNSCKLSSSFIITQNMFCAGYDTKQEDACQGDSGGPHVTRFKDTYFVTGIVSWGEGCARKGKYGIYTKVTAFLKWIDRSMKTRGLPKAKSHAPEVITSSPLK

SEQ ID NO: 181 - DNA, 1269 bp, Artificial
  Recombinant
gaccagtgtgagaccagtccttgccagaaccagggcaaatgtaaagacggcctcggggaatacacctgtacctgtttagaaggattcgaaggcaaaaactgtgaattattcacacggaagctctgcagcctggacaacggggactgtgaccagttctgccacgaggaacagaactctgtggtgtgctcctgcgcccgcgggtacaccctggctgacaacggcaaggcctgcattcccacagggccctacccctgtgggaaacagaccctggaacgcaggaagaggtcagtggcccaggccaccagcagcagcggggaggcccctgacagcatcacatggaagccatatgatgcagccgacctggaccccaccgagaaccccttcgacctgcttgacttcaaccagacgcagcctgagaggggcgacaacaacctcaccaggaacgagtccaccaccaagatcaagcccagaatcgtgggaggccaggaatgcaaggacggggagtgtccctggcaggccctgctcatcaatgaggaaaacgagggtttctgtggtggaactattctgagcgagttctacatcctaacggcagcccactgtctctaccaagccaagagattcaaggtgagggtaggggaccggaacacggagcaggaggagggcggtgaggcggtgcacgaggtggaggtggtcatcaagcacaaccggttcacaaaggagacctatgacttcgacatcgccgtgctccggctcaagacccccatcaccttccgcatgaacgtggcgcctgcctgcctccccgagcgtgactgggccgagtccacgctgatgacgcagaagacggggattgtgagtggcttcgggcgcacccacgagaagggccggcagtccaccaggctcaagatgctggaggtgccctacgtggaccgcaacagctgcaagctgtccagcagcttcatcatcacccagaacatgttctgtgccggctacgacaccaagcaggaggatgcctgccagggggacagcgggggcccgcacgtcacccgcttcaaggacacctacttcgtgacaggcatcgtcagctggggagagggctgtgcccgtaaggggaagtacgggatctacaccaaggtcaccgccttcctcaagtggatcgacaggtccatgaaaaccaggggcttgcccaaggccaagagccatgccccggaggtcataacgtcctctccattaaaggaggaccaagtagatccgcggctcattgatgggaag

SEQ ID NO: 182 - protein, 423 aa, Artificial
  Recombinant
DQCETSPCQNQGKCKDGLGEYTCTCLEGFEGKNCELFTRKLCSLDNGDCDQFCHEEQNSVVCSCARGYTLADNGKACIPTGPYPCGKQTLERRKRSVAQATSSSGEAPDSITWKPYDAADLDPTENPFDLLDFNQTQPERGDNNLTRNESTTKIKPRIVGGQECKDGECPWQALLINEENEGFCGGTILSEFYILTAAHCLYQAKRFKVRVGDRNTEQEEGGEAVHEVEVVIKHNRFTKETYDFDIAVLRLKTPITFRMNVAPACLPERDWAESTLMTQKTGIVSGFGRTHEKGRQSTRLKMLEVPYVDRNSCKLSSSFIITQNMFCAGYDTKQEDACQGDSGGPHVTRFKDTYFVTGIVSWGEGCARKGKYGIYTKVTAFLKWIDRSMKTRGLPKAKSHAPEVITSSPLKEDQVDPRLIDGK

SEQ ID NO: 183 - DNA, 1374 bp, Artificial
  Recombinant
gccaattcctttcttgaagagatgaagaaaggacacctcgaaagagagtgcatggaagagacctgctcatacgaagaggcccgcgaggtctttgaggacagcgacaagacgaatgaattctggaataaatacaaagatggcgaccagtgtgagaccagtccttgccagaaccagggcaaatgtaaagacggcctcggggaatacacctgtacctgtttagaaggattcgaaggcaaaaactgtgaattattcacacggaagctctgcagcctggacaacggggactgtgaccagttctgccacgaggaacagaactctgtggtgtgctcctgcgcccgcgggtacaccctggctgacaacggcaaggcctgcattcccacagggccctacccctgtgggaaacagaccctggaacgcaggaagaggtcagtggcccaggccaccagcagcagcggggaggcccctgacagcatcacatggaagccatatgatgcagccgacctggaccccaccgagaaccccttcgacctgcttgacttcaaccagacgcagcctgagaggggcgacaacaacctcaccaggaacgagtccaccaccaagatcaagcccagaatcgtgggaggccaggaatgcaaggacggggagtgtccctggcaggccctgctcatcaatgaggaaaacgagggtttctgtggtggaactattctgagcgagttctacatcctaacggcagcccactgtctctaccaagccaagagattcaaggtgagggtaggggaccggaacacggagcaggaggagggcggtgaggcggtgcacgaggtggaggtggtcatcaagcacaaccggttcacaaaggagacctatgacttcgacatcgccgtgctccggctcaagacccccatcaccttccgcatgaacgtggcgcctgcctgcctccccgagcgtgactgggccgagtccacgctgatgacgcagaagacggggattgtgagtggcttcgggcgcacccacgagaagggccggcagtccaccaggctcaagatgctggaggtgccctacgtggaccgcaacagctgcaagctgtccagcagcttcatcatcacccagaacatgttctgtgccggctacgacaccaagcaggaggatgcctgccagggggacagcgggggcccgcacgtcacccgcttcaaggacacctacttcgtgacaggcatcgtcagctggggagagggctgtgcccgtaaggggaagtacgggatctacaccaaggtcaccgccttcctcaagtggatcgacaggtccatgaaaaccaggggcttgcccaaggccaagagccatgccccggaggtcataacgtcctctccattaaag

SEQ ID NO: 184 - protein, 458 aa, Artificial
  Recombinant
ANSFLEEMKKGHLERECMEETCSYEEAREVFEDSDKTNEFWNKYKDGDQCETSPCQNQGKCKDGLGEYTCTCLEGFEGKNCELFTRKLCSLDNGDCDQFCHEEQNSVVCSCARGYTLADNGKACIPTGPYPCGKQTLERRKRSVAQATSSSGEAPDSITWKPYDAADLDPTENPFDLLDFNQTQPERGDNNLTRNESTTKIKPRIVGGQECKDGECPWQALLINEENEGFCGGTILSEFYILTAAHCLYQAKRFKVRVGDRNTEQEEGGEAVHEVEVVIKHNRFTKETYDFDIAVLRLKTPITFRMNVAPACLPERDWAESTLMTQKTGIVSGFGRTHEKGRQSTRLKMLEVPYVDRNSCKLSSSFIITQNMFCAGYDTKQEDACQGDSGGPHVTRFKDTYFVTGIVSWGEGCARKGKYGIYTKVTAFLKWIDRSMKTRGLPKAKSHAPEVITSSPLK

SEQ ID NO: 185 - DNA, 1269 bp, Artificial
  Recombinant
gaccagtgtgagaccagtccttgccagaaccagggcaaatgtaaagacggcctcggggaatacacctgtacctgtttagaaggattcgaaggcaaaaactgtgaattattcacacggaagctctgcagcctggacaacggggactgtgaccagttctgccacgaggaacagaactctgtggtgtgctcctgcgcccgcgggtacaccctggctgacaacggcaaggcctgcattcccacagggccctacccctgtgggaaacagaccctggaacgcaggaagaggtcagtggcccaggccaccagcagcagcggggaggcccctgacagcatcacatggaagccatatgatgcagccgacctggaccccaccgagaaccccttcgacctgcttgacttcaaccagacgcagcctgagaggggcgacaacaacctcaccaggagcacccccagcatcctgcccgcccccagaatcgtgggaggccaggaatgcaaggacggggagtgtccctggcaggccctgctcatcaatgaggaaaacgagggtttctgtggtggaactattctgagcgagttctacatcctaacggcagcccactgtctctaccaagccaagagattcaaggtgagggtaggggaccggaacacggagcaggaggagggcggtgaggcggtgcacgaggtggaggtggtcatcaagcacaaccggttcacaaaggagacctatgacttcgacatcgccgtgctccggctcaagacccccatcaccttccgcatgaacgtggcgcctgcctgcctccccgagcgtgactgggccgagtccacgctgatgacgcagaagacggggattgtgagtggcttcgggcgcacccacgagaagggccggcagtccaccaggctcaagatgctggaggtgccctacgtggaccgcaacagctgcaagctgtccagcagcttcatcatcacccagaacatgttctgtgccggctacgacaccaagcaggaggatgcctgccagggggacagcgggggcccgcacgtcacccgcttcaaggacacctacttcgtgacaggcatcgtcagctggggagagggctgtgcccgtaaggggaagtacgggatctacaccaaggtcaccgccttcctcaagtggatcgacaggtccatgaaaaccaggggcttgcccaaggccaagagccatgccccggaggtcataacgtcctctccattaaaggaggaccaagtagatccgcggctcattgatgggaag

SEQ ID NO: 186 - protein, 423 aa, Artificial
  Recombinant
DQCETSPCQNQGKCKDGLGEYTCTCLEGFEGKNCELFTRKLCSLDNGDCDQFCHEEQNSVVCSCARGYTLADNGKACIPTGPYPCGKQTLERRKRSVAQATSSSGEAPDSITWKPYDAADLDPTENPFDLLDFNQTQPERGDNNLTRSTPSILPAPRIVGGQECKDGECPWQALLINEENEGFCGGTILSEFYILTAAHCLYQAKRFKVRVGDRNTEQEEGGEAVHEVEVVIKHNRFTKETYDFDIAVLRLKTPITFRMNVAPACLPERDWAESTLMTQKTGIVSGFGRTHEKGRQSTRLKMLEVPYVDRNSCKLSSSFIITQNMFCAGYDTKQEDACQGDSGGPHVTRFKDTYFVTGIVSWGEGCARKGKYGIYTKVTAFLKWIDRSMKTRGLPKAKSHAPEVITSSPLKEDQVDPRLIDGK

SEQ ID NO: 187 - DNA, 1374 bp, Artificial
  Recombinant
gccaattcctttcttgaagagatgaagaaaggacacctcgaaagagagtgcatggaagagacctgctcatacgaagaggcccgcgaggtctttgaggacagcgacaagacgaatgaattctggaataaatacaaagatggcgaccagtgtgagaccagtccttgccagaaccagggcaaatgtaaagacggcctcggggaatacacctgtacctgtttagaaggattcgaaggcaaaaactgtgaattattcacacggaagctctgcagcctggacaacggggactgtgaccagttctgccacgaggaacagaactctgtggtgtgctcctgcgcccgcgggtacaccctggctgacaacggcaaggcctgcattcccacagggccctacccctgtgggaaacagaccctggaacgcaggaagaggtcagtggcccaggccaccagcagcagcggggaggcccctgacagcatcacatggaagccatatgatgcagccgacctggaccccaccgagaaccccttcgacctgcttgacttcaaccagacgcagcctgagaggggcgacaacaacctcaccaggagcacccccagcatcctgcccgcccccagaatcgtgggaggccaggaatgcaaggacggggagtgtccctggcaggccctgctcatcaatgaggaaaacgagggtttctgtggtggaactattctgagcgagttctacatcctaacggcagcccactgtctctaccaagccaagagattcaaggtgagggtaggggaccggaacacggagcaggaggagggcggtgaggcggtgcacgaggtggaggtggtcatcaagcacaaccggttcacaaaggagacctatgacttcgacatcgccgtgctccggctcaagacccccatcaccttccgcatgaacgtggcgcctgcctgcctccccgagcgtgactgggccgagtccacgctgatgacgcagaagacggggattgtgagtggcttcgggcgcacccacgagaagggccggcagtccaccaggctcaagatgctggaggtgccctacgtggaccgcaacagctgcaagctgtccagcagcttcatcatcacccagaacatgttctgtgccggctacgacaccaagcaggaggatgcctgccagggggacagcgggggcccgcacgtcacccgcttcaaggacacctacttcgtgacaggcatcgtcagctggggagagggctgtgcccgtaaggggaagtacgggatctacaccaaggtcaccgccttcctcaagtggatcgacaggtccatgaaaaccaggggcttgcccaaggccaagagccatgccccggaggtcataacgtcctctccattaaag

SEQ ID NO: 188 - protein, 458 aa, Artificial
  Recombinant
ANSFLEEMKKGHLERECMEETCSYEEAREVFEDSDKTNEFWNKYKDGDQCETSPCQNQGKCKDGLGEYTCTCLEGFEGKNCELFTRKLCSLDNGDCDQFCHEEQNSVVCSCARGYTLADNGKACIPTGPYPCGKQTLERRKRSVAQATSSSGEAPDSITWKPYDAADLDPTENPFDLLDFNQTQPERGDNNLTRSTPSILPAPRIVGGQECKDGECPWQALLINEENEGFCGGTILSEFYILTAAHCLYQAKRFKVRVGDRNTEQEEGGEAVHEVEVVIKHNRFTKETYDFDIAVLRLKTPITFRMNVAPACLPERDWAESTLMTQKTGIVSGFGRTHEKGRQSTRLKMLEVPYVDRNSCKLSSSFIITQNMFCAGYDTKQEDACQGDSGGPHVTRFKDTYFVTGIVSWGEGCARKGKYGIYTKVTAFLKWIDRSMKTRGLPKAKSHAPEVITSSPLK

SEQ ID NO: 189 - DNA, 1269 bp, Artificial
  Recombinant
gaccagtgtgagaccagtccttgccagaaccagggcaaatgtaaagacggcctcggggaatacacctgtacctgtttagaaggattcgaaggcaaaaactgtgaattattcacacggaagctctgcagcctggacaacggggactgtgaccagttctgccacgaggaacagaactctgtggtgtgctcctgcgcccgcgggtacaccctggctgacaacggcaaggcctgcattcccacagggccctacccctgtgggaaacagaccctggaacgcaggaagaggtcagtggcccaggccaccagcagcagcggggaggcccctgacagcatcacatggaagccatatgatgcagccgacctggaccccaccgagaaccccttcgacctgcttgacttcaaccagacgcagcctgagaggggcgacaacaacctcaccaggaccgtggagctgcagggcgtggtgcccagaatcgtgggaggccaggaatgcaaggacggggagtgtccctggcaggccctgctcatcaatgaggaaaacgagggtttctgtggtggaactattctgagcgagttctacatcctaacggcagcccactgtctctaccaagccaagagattcaaggtgagggtaggggaccggaacacggagcaggaggagggcggtgaggcggtgcacgaggtggaggtggtcatcaagcacaaccggttcacaaaggagacctatgacttcgacatcgccgtgctccggctcaagacccccatcaccttccgcatgaacgtggcgcctgcctgcctccccgagcgtgactgggccgagtccacgctgatgacgcagaagacggggattgtgagtggcttcgggcgcacccacgagaagggccggcagtccaccaggctcaagatgctggaggtgccctacgtggaccgcaacagctgcaagctgtccagcagcttcatcatcacccagaacatgttctgtgccggctacgacaccaagcaggaggatgcctgccagggggacagcgggggcccgcacgtcacccgcttcaaggacacctacttcgtgacaggcatcgtcagctggggagagggctgtgcccgtaaggggaagtacgggatctacaccaaggtcaccgccttcctcaagtggatcgacaggtccatgaaaaccaggggcttgcccaaggccaagagccatgccccggaggtcataacgtcctctccattaaaggaggaccaagtagatccgcggctcattgatgggaag

SEQ ID NO: 190 - protein, 423 aa, Artificial
  Recombinant
DQCETSPCQNQGKCKDGLGEYTCTCLEGFEGKNCELFTRKLCSLDNGDCDQFCHEEQNSVVCSCARGYTLADNGKACIPTGPYPCGKQTLERRKRSVAQATSSSGEAPDSITWKPYDAADLDPTENPFDLLDFNQTQPERGDNNLTRTVELQGVVPRIVGGQECKDGECPWQALLINEENEGFCGGTILSEFYILTAAHCLYQAKRFKVRVGDRNTEQEEGGEAVHEVEVVIKHNRFTKETYDFDIAVLRLKTPITFRMNVAPACLPERDWAESTLMTQKTGIVSGFGRTHEKGRQSTRLKMLEVPYVDRNSCKLSSSFIITQNMFCAGYDTKQEDACQGDSGGPHVTRFKDTYFVTGIVSWGEGCARKGKYGIYTKVTAFLKWIDRSMKTRGLPKAKSHAPEVITSSPLKEDQVDPRLIDGK

SEQ ID NO: 191 - DNA, 1374 bp, Artificial
  Recombinant
gccaattcctttcttgaagagatgaagaaaggacacctcgaaagagagtgcatggaagagacctgctcatacgaagaggcccgcgaggtctttgaggacagcgacaagacgaatgaattctggaataaatacaaagatggcgaccagtgtgagaccagtccttgccagaaccagggcaaatgtaaagacggcctcggggaatacacctgtacctgtttagaaggattcgaaggcaaaaactgtgaattattcacacggaagctctgcagcctggacaacggggactgtgaccagttctgccacgaggaacagaactctgtggtgtgctcctgcgcccgcgggtacaccctggctgacaacggcaaggcctgcattcccacagggccctacccctgtgggaaacagaccctggaacgcaggaagaggtcagtggcccaggccaccagcagcagcggggaggcccctgacagcatcacatggaagccatatgatgcagccgacctggaccccaccgagaaccccttcgacctgcttgacttcaaccagacgcagcctgagaggggcgacaacaacctcaccaggaccgtggagctgcagggcgtggtgcccagaatcgtgggaggccaggaatgcaaggacggggagtgtccctggcaggccctgctcatcaatgaggaaaacgagggtttctgtggtggaactattctgagcgagttctacatcctaacggcagcccactgtctctaccaagccaagagattcaaggtgagggtaggggaccggaacacggagcaggaggagggcggtgaggcggtgcacgaggtggaggtggtcatcaagcacaaccggttcacaaaggagacctatgacttcgacatcgccgtgctccggctcaagacccccatcaccttccgcatgaacgtggcgcctgcctgcctccccgagcgtgactgggccgagtccacgctgatgacgcagaagacggggattgtgagtggcttcgggcgcacccacgagaagggccggcagtccaccaggctcaagatgctggaggtgccctacgtggaccgcaacagctgcaagctgtccagcagcttcatcatcacccagaacatgttctgtgccggctacgacaccaagcaggaggatgcctgccagggggacagcgggggcccgcacgtcacccgcttcaaggacacctacttcgtgacaggcatcgtcagctggggagagggctgtgcccgtaaggggaagtacgggatctacaccaaggtcaccgccttcctcaagtggatcgacaggtccatgaaaaccaggggcttgcccaaggccaagagccatgccccggaggtcataacgtcctctccattaaag

SEQ ID NO: 192 - protein, 458 aa, Artificial
  Recombinant
ANSFLEEMKKGHLERECMEETCSYEEAREVFEDSDKTNEFWNKYKDGDQCETSPCQNQGKCKDGLGEYTCTCLEGFEGKNCELFTRKLCSLDNGDCDQFCHEEQNSVVCSCARGYTLADNGKACIPTGPYPCGKQTLERRKRSVAQATSSSGEAPDSITWKPYDAADLDPTENPFDLLDFNQTQPERGDNNLTRTVELQGVVPRIVGGQECKDGECPWQALLINEENEGFCGGTILSEFYILTAAHCLYQAKRFKVRVGDRNTEQEEGGEAVHEVEVVIKHNRFTKETYDFDIAVLRLKTPITFRMNVAPACLPERDWAESTLMTQKTGIVSGFGRTHEKGRQSTRLKMLEVPYVDRNSCKLSSSFIITQNMFCAGYDTKQEDACQGDSGGPHVTRFKDTYFVTGIVSWGEGCARKGKYGIYTKVTAFLKWIDRSMKTRGLPKAKSHAPEVITSSPLK

SEQ ID NO: 193 - DNA, 1269 bp, Artificial
  Recombinant
gaccagtgtgagaccagtccttgccagaaccagggcaaatgtaaagacggcctcggggaatacacctgtacctgtttagaaggattcgaaggcaaaaactgtgaattattcacacggaagctctgcagcctggacaacggggactgtgaccagttctgccacgaggaacagaactctgtggtgtgctcctgcgcccgcgggtacaccctggctgacaacggcaaggcctgcattcccacagggccctacccctgtgggaaacagaccctggaacgcaggaagaggtcagtggcccaggccaccagcagcagcggggaggcccctgacagcatcacatggaagccatatgatgcagccgacctggaccccaccgagaaccccttcgacctgcttgacttcaaccagacgcagcctgagaggggcgacaacaacctcaccagggataatagccccagcttcatccagatcagaatcgtgggaggccaggaatgcaaggacggggagtgtccctggcaggccctgctcatcaatgaggaaaacgagggtttctgtggtggaactattctgagcgagttctacatcctaacggcagcccactgtctctaccaagccaagagattcaaggtgagggtaggggaccggaacacggagcaggaggagggcggtgaggcggtgcacgaggtggaggtggtcatcaagcacaaccggttcacaaaggagacctatgacttcgacatcgccgtgctccggctcaagacccccatcaccttccgcatgaacgtggcgcctgcctgcctccccgagcgtgactgggccgagtccacgctgatgacgcagaagacggggattgtgagtggcttcgggcgcacccacgagaagggccggcagtccaccaggctcaagatgctggaggtgccctacgtggaccgcaacagctgcaagctgtccagcagcttcatcatcacccagaacatgttctgtgccggctacgacaccaagcaggaggatgcctgccagggggacagcgggggcccgcacgtcacccgcttcaaggacacctacttcgtgacaggcatcgtcagctggggagagggctgtgcccgtaaggggaagtacgggatctacaccaaggtcaccgccttcctcaagtggatcgacaggtccatgaaaaccaggggcttgcccaaggccaagagccatgccccggaggtcataacgtcctctccattaaaggaggaccaagtagatccgcggctcattgatgggaag

SEQ ID NO: 194 - protein, 423 aa, Artificial
  Recombinant
DQCETSPCQNQGKCKDGLGEYTCTCLEGFEGKNCELFTRKLCSLDNGDCDQFCHEEQNSVVCSCARGYTLADNGKACIPTGPYPCGKQTLERRKRSVAQATSSSGEAPDSITWKPYDAADLDPTENPFDLLDFNQTQPERGDNNLTRDNSPSFIQIRIVGGQECKDGECPWQALLINEENEGFCGGTILSEFYILTAAHCLYQAKRFKVRVGDRNTEQEEGGEAVHEVEVVIKHNRFTKETYDFDIAVLRLKTPITFRMNVAPACLPERDWAESTLMTQKTGIVSGFGRTHEKGRQSTRLKMLEVPYVDRNSCKLSSSFIITQNMFCAGYDTKQEDACQGDSGGPHVTRFKDTYFVTGIVSWGEGCARKGKYGIYTKVTAFLKWIDRSMKTRGLPKAKSHAPEVITSSPLKEDQVDPRLIDGK

SEQ ID NO: 195 - DNA, 1374 bp, Artificial
  Recombinant
gccaattcctttcttgaagagatgaagaaaggacacctcgaaagagagtgcatggaagagacctgctcatacgaagaggcccgcgaggtctttgaggacagcgacaagacgaatgaattctggaataaatacaaagatggcgaccagtgtgagaccagtccttgccagaaccagggcaaatgtaaagacggcctcggggaatacacctgtacctgtttagaaggattcgaaggcaaaaactgtgaattattcacacggaagctctgcagcctggacaacggggactgtgaccagttctgccacgaggaacagaactctgtggtgtgctcctgcgcccgcgggtacaccctggctgacaacggcaaggcctgcattcccacagggccctacccctgtgggaaacagaccctggaacgcaggaagaggtcagtggcccaggccaccagcagcagcggggaggcccctgacagcatcacatggaagccatatgatgcagccgacctggaccccaccgagaaccccttcgacctgcttgacttcaaccagacgcagcctgagaggggcgacaacaacctcaccagggataatagccccagcttcatccagatcagaatcgtgggaggccaggaatgcaaggacggggagtgtccctggcaggccctgctcatcaatgaggaaaacgagggtttctgtggtggaactattctgagcgagttctacatcctaacggcagcccactgtctctaccaagccaagagattcaaggtgagggtaggggaccggaacacggagcaggaggagggcggtgaggcggtgcacgaggtggaggtggtcatcaagcacaaccggttcacaaaggagacctatgacttcgacatcgccgtgctccggctcaagacccccatcaccttccgcatgaacgtggcgcctgcctgcctccccgagcgtgactgggccgagtccacgctgatgacgcagaagacggggattgtgagtggcttcgggcgcacccacgagaagggccggcagtccaccaggctcaagatgctggaggtgccctacgtggaccgcaacagctgcaagctgtccagcagcttcatcatcacccagaacatgttctgtgccggctacgacaccaagcaggaggatgcctgccagggggacagcgggggcccgcacgtcacccgcttcaaggacacctacttcgtgacaggcatcgtcagctggggagagggctgtgcccgtaaggggaagtacgggatctacaccaaggtcaccgccttcctcaagtggatcgacaggtccatgaaaaccaggggcttgcccaaggccaagagccatgccccggaggtcataacgtcctctccattaaag

SEQ ID NO: 196 - protein, 458 aa, Artificial
  Recombinant
ANSFLEEMKKGHLERECMEETCSYEEAREVFEDSDKTNEFWNKYKDGDQCETSPCQNQGKCKDGLGEYTCTCLEGFEGKNCELFTRKLCSLDNGDCDQFCHEEQNSVVCSCARGYTLADNGKACIPTGPYPCGKQTLERRKRSVAQATSSSGEAPDSITWKPYDAADLDPTENPFDLLDFNQTQPERGDNNLTRDNSPSFIQIRIVGGQECKDGECPWQALLINEENEGFCGGTILSEFYILTAAHCLYQAKRFKVRVGDRNTEQEEGGEAVHEVEVVIKHNRFTKETYDFDIAVLRLKTPITFRMNVAPACLPERDWAESTLMTQKTGIVSGFGRTHEKGRQSTRLKMLEVPYVDRNSCKLSSSFIITQNMFCAGYDTKQEDACQGDSGGPHVTRFKDTYFVTGIVSWGEGCARKGKYGIYTKVTAFLKWIDRSMKTRGLPKAKSHAPEVITSSPLK

SEQ ID NO: 197 - DNA, 1269 bp, Artificial
  Recombinant
gaccagtgtgagaccagtccttgccagaaccagggcaaatgtaaagacggcctcggggaatacacctgtacctgtttagaaggattcgaaggcaaaaactgtgaattattcacacggaagctctgcagcctggacaacggggactgtgaccagttctgccacgaggaacagaactctgtggtgtgctcctgcgcccgcgggtacaccctggctgacaacggcaaggcctgcattcccacagggccctacccctgtgggaaacagaccctggaacgcaggaagaggtcagtggcccaggccaccagcagcagcggggaggcccctgacagcatcacatggaagccatatgatgcagccgacctggaccccaccgagaaccccttcgacctgcttgacttcaaccagacgcagcctgagaggggcgacaacaacctcaccagggataatgaggagggcttcttcagcgccagaatcgtgggaggccaggaatgcaaggacggggagtgtccctggcaggccctgctcatcaatgaggaaaacgagggtttctgtggtggaactattctgagcgagttctacatcctaacggcagcccactgtctctaccaagccaagagattcaaggtgagggtaggggaccggaacacggagcaggaggagggcggtgaggcggtgcacgaggtggaggtggtcatcaagcacaaccggttcacaaaggagacctatgacttcgacatcgccgtgctccggctcaagacccccatcaccttccgcatgaacgtggcgcctgcctgcctccccgagcgtgactgggccgagtccacgctgatgacgcagaagacggggattgtgagtggcttcgggcgcacccacgagaagggccggcagtccaccaggctcaagatgctggaggtgccctacgtggaccgcaacagctgcaagctgtccagcagcttcatcatcacccagaacatgttctgtgccggctacgacaccaagcaggaggatgcctgccagggggacagcgggggcccgcacgtcacccgcttcaaggacacctacttcgtgacaggcatcgtcagctggggagagggctgtgcccgtaaggggaagtacgggatctacaccaaggtcaccgccttcctcaagtggatcgacaggtccatgaaaaccaggggcttgcccaaggccaagagccatgccccggaggtcataacgtcctctccattaaaggaggaccaagtagatccgcggctcattgatgggaag

SEQ ID NO: 198 - protein, 423 aa, Artificial
  Recombinant
DQCETSPCQNQGKCKDGLGEYTCTCLEGFEGKNCELFTRKLCSLDNGDCDQFCHEEQNSVVCSCARGYTLADNGKACIPTGPYPCGKQTLERRKRSVAQATSSSGEAPDSITWKPYDAADLDPTENPFDLLDFNQTQPERGDNNLTRDNEEGFFSARIVGGQECKDGECPWQALLINEENEGFCGGTILSEFYILTAAHCLYQAKRFKVRVGDRNTEQEEGGEAVHEVEVVIKHNRFTKETYDFDIAVLRLKTPITFRMNVAPACLPERDWAESTLMTQKTGIVSGFGRTHEKGRQSTRLKMLEVPYVDRNSCKLSSSFIITQNMFCAGYDTKQEDACQGDSGGPHVTRFKDTYFVTGIVSWGEGCARKGKYGIYTKVTAFLKWIDRSMKTRGLPKAKSHAPEVITSSPLKEDQVDPRLIDGK

SEQ ID NO: 199 - DNA, 1374 bp, Artificial
  Recombinant
gccaattcctttcttgaagagatgaagaaaggacacctcgaaagagagtgcatggaagagacctgctcatacgaagaggcccgcgaggtctttgaggacagcgacaagacgaatgaattctggaataaatacaaagatggcgaccagtgtgagaccagtccttgccagaaccagggcaaatgtaaagacggcctcggggaatacacctgtacctgtttagaaggattcgaaggcaaaaactgtgaattattcacacggaagctctgcagcctggacaacggggactgtgaccagttctgccacgaggaacagaactctgtggtgtgctcctgcgcccgcgggtacaccctggctgacaacggcaaggcctgcattcccacagggccctacccctgtgggaaacagaccctggaacgcaggaagaggtcagtggcccaggccaccagcagcagcggggaggcccctgacagcatcacatggaagccatatgatgcagccgacctggaccccaccgagaaccccttcgacctgcttgacttcaaccagacgcagcctgagaggggcgacaacaacctcaccagggataatgaggagggcttcttcagcgccagaatcgtgggaggccaggaatgcaaggacggggagtgtccctggcaggccctgctcatcaatgaggaaaacgagggtttctgtggtggaactattctgagcgagttctacatcctaacggcagcccactgtctctaccaagccaagagattcaaggtgagggtaggggaccggaacacggagcaggaggagggcggtgaggcggtgcacgaggtggaggtggtcatcaagcacaaccggttcacaaaggagacctatgacttcgacatcgccgtgctccggctcaagacccccatcaccttccgcatgaacgtggcgcctgcctgcctccccgagcgtgactgggccgagtccacgctgatgacgcagaagacggggattgtgagtggcttcgggcgcacccacgagaagggccggcagtccaccaggctcaagatgctggaggtgccctacgtggaccgcaacagctgcaagctgtccagcagcttcatcatcacccagaacatgttctgtgccggctacgacaccaagcaggaggatgcctgccagggggacagcgggggcccgcacgtcacccgcttcaaggacacctacttcgtgacaggcatcgtcagctggggagagggctgtgcccgtaaggggaagtacgggatctacaccaaggtcaccgccttcctcaagtggatcgacaggtccatgaaaaccaggggcttgcccaaggccaagagccatgccccggaggtcataacgtcctctccattaaag

SEQ ID NO: 200 - protein, 458 aa, Artificial
  Recombinant
ANSFLEEMKKGHLERECMEETCSYEEAREVFEDSDKTNEFWNKYKDGDQCETSPCQNQGKCKDGLGEYTCTCLEGFEGKNCELFTRKLCSLDNGDCDQFCHEEQNSVVCSCARGYTLADNGKACIPTGPYPCGKQTLERRKRSVAQATSSSGEAPDSITWKPYDAADLDPTENPFDLLDFNQTQPERGDNNLTRDNEEGFFSARIVGGQECKDGECPWQALLINEENEGFCGGTILSEFYILTAAHCLYQAKRFKVRVGDRNTEQEEGGEAVHEVEVVIKHNRFTKETYDFDIAVLRLKTPITFRMNVAPACLPERDWAESTLMTQKTGIVSGFGRTHEKGRQSTRLKMLEVPYVDRNSCKLSSSFIITQNMFCAGYDTKQEDACQGDSGGPHVTRFKDTYFVTGIVSWGEGCARKGKYGIYTKVTAFLKWIDRSMKTRGLPKAKSHAPEVITSSPLK

SEQ ID NO: 201 - DNA, 1269 bp, Artificial
  Recombinant
gaccagtgtgagaccagtccttgccagaaccagggcaaatgtaaagacggcctcggggaatacacctgtacctgtttagaaggattcgaaggcaaaaactgtgaattattcacacggaagctctgcagcctggacaacggggactgtgaccagttctgccacgaggaacagaactctgtggtgtgctcctgcgcccgcgggtacaccctggctgacaacggcaaggcctgcattcccacagggccctacccctgtgggaaacagaccctggaacgcaggaagaggtcagtggcccaggccaccagcagcagcggggaggcccctgacagcatcacatggaagccatatgatgcagccgacctggaccccaccgagaaccccttcgacctgcttgacttcaaccagacgcagcctgagaggggcgacaacaacctcaccaggcccgataatatcgccgcctggtacctgagaatcgtgggaggccaggaatgcaaggacggggagtgtccctggcaggccctgctcatcaatgaggaaaacgagggtttctgtggtggaactattctgagcgagttctacatcctaacggcagcccactgtctctaccaagccaagagattcaaggtgagggtaggggaccggaacacggagcaggaggagggcggtgaggcggtgcacgaggtggaggtggtcatcaagcacaaccggttcacaaaggagacctatgacttcgacatcgccgtgctccggctcaagacccccatcaccttccgcatgaacgtggcgcctgcctgcctccccgagcgtgactgggccgagtccacgctgatgacgcagaagacggggattgtgagtggcttcgggcgcacccacgagaagggccggcagtccaccaggctcaagatgctggaggtgccctacgtggaccgcaacagctgcaagctgtccagcagcttcatcatcacccagaacatgttctgtgccggctacgacaccaagcaggaggatgcctgccagggggacagcgggggcccgcacgtcacccgcttcaaggacacctacttcgtgacaggcatcgtcagctggggagagggctgtgcccgtaaggggaagtacgggatctacaccaaggtcaccgccttcctcaagtggatcgacaggtccatgaaaaccaggggcttgcccaaggccaagagccatgccccggaggtcataacgtcctctccattaaaggaggaccaagtagatccgcggctcattgatgggaag

SEQ ID NO: 202 - protein, 423 aa, Artificial
  Recombinant
DQCETSPCQNQGKCKDGLGEYTCTCLEGFEGKNCELFTRKLCSLDNGDCDQFCHEEQNSVVCSCARGYTLADNGKACIPTGPYPCGKQTLERRKRSVAQATSSSGEAPDSITWKPYDAADLDPTENPFDLLDFNQTQPERGDNNLTRPDNIAAWYLRIVGGQECKDGECPWQALLINEENEGFCGGTILSEFYILTAAHCLYQAKRFKVRVGDRNTEQEEGGEAVHEVEVVIKHNRFTKETYDFDIAVLRLKTPITFRMNVAPACLPERDWAESTLMTQKTGIVSGFGRTHEKGRQSTRLKMLEVPYVDRNSCKLSSSFIITQNMFCAGYDTKQEDACQGDSGGPHVTRFKDTYFVTGIVSWGEGCARKGKYGIYTKVTAFLKWIDRSMKTRGLPKAKSHAPEVITSSPLKEDQVDPRLIDGK

SEQ ID NO: 203 - DNA, 1374 bp, Artificial
  Recombinant
gccaattcctttcttgaagagatgaagaaaggacacctcgaaagagagtgcatggaagagacctgctcatacgaagaggcccgcgaggtctttgaggacagcgacaagacgaatgaattctggaataaatacaaagatggcgaccagtgtgagaccagtccttgccagaaccagggcaaatgtaaagacggcctcggggaatacacctgtacctgtttagaaggattcgaaggcaaaaactgtgaattattcacacggaagctctgcagcctggacaacggggactgtgaccagttctgccacgaggaacagaactctgtggtgtgctcctgcgcccgcgggtacaccctggctgacaacggcaaggcctgcattcccacagggccctacccctgtgggaaacagaccctggaacgcaggaagaggtcagtggcccaggccaccagcagcagcggggaggcccctgacagcatcacatggaagccatatgatgcagccgacctggaccccaccgagaaccccttcgacctgcttgacttcaaccagacgcagcctgagaggggcgacaacaacctcaccaggcccgataatatcgccgcctggtacctgagaatcgtgggaggccaggaatgcaaggacggggagtgtccctggcaggccctgctcatcaatgaggaaaacgagggtttctgtggtggaactattctgagcgagttctacatcctaacggcagcccactgtctctaccaagccaagagattcaaggtgagggtaggggaccggaacacggagcaggaggagggcggtgaggcggtgcacgaggtggaggtggtcatcaagcacaaccggttcacaaaggagacctatgacttcgacatcgccgtgctccggctcaagacccccatcaccttccgcatgaacgtggcgcctgcctgcctccccgagcgtgactgggccgagtccacgctgatgacgcagaagacggggattgtgagtggcttcgggcgcacccacgagaagggccggcagtccaccaggctcaagatgctggaggtgccctacgtggaccgcaacagctgcaagctgtccagcagcttcatcatcacccagaacatgttctgtgccggctacgacaccaagcaggaggatgcctgccagggggacagcgggggcccgcacgtcacccgcttcaaggacacctacttcgtgacaggcatcgtcagctggggagagggctgtgcccgtaaggggaagtacgggatctacaccaaggtcaccgccttcctcaagtggatcgacaggtccatgaaaaccaggggcttgcccaaggccaagagccatgccccggaggtcataacgtcctctccattaaag

SEQ ID NO: 204 - protein, 458 aa, Artificial
  Recombinant
ANSFLEEMKKGHLERECMEETCSYEEAREVFEDSDKTNEFWNKYKDGDQCETSPCQNQGKCKDGLGEYTCTCLEGFEGKNCELFTRKLCSLDNGDCDQFCHEEQNSVVCSCARGYTLADNGKACIPTGPYPCGKQTLERRKRSVAQATSSSGEAPDSITWKPYDAADLDPTENPFDLLDFNQTQPERGDNNLTRPDNIAAWYLRIVGGQECKDGECPWQALLINEENEGFCGGTILSEFYILTAAHCLYQAKRFKVRVGDRNTEQEEGGEAVHEVEVVIKHNRFTKETYDFDIAVLRLKTPITFRMNVAPACLPERDWAESTLMTQKTGIVSGFGRTHEKGRQSTRLKMLEVPYVDRNSCKLSSSFIITQNMFCAGYDTKQEDACQGDSGGPHVTRFKDTYFVTGIVSWGEGCARKGKYGIYTKVTAFLKWIDRSMKTRGLPKAKSHAPEVITSSPLK

SEQ ID NO: 205 - DNA, 1269 bp, Artificial
  Recombinant
gaccagtgtgagaccagtccttgccagaaccagggcaaatgtaaagacggcctcggggaatacacctgtacctgtttagaaggattcgaaggcaaaaactgtgaattattcacacggaagctctgcagcctggacaacggggactgtgaccagttctgccacgaggaacagaactctgtggtgtgctcctgcgcccgcgggtacaccctggctgacaacggcaaggcctgcattcccacagggccctacccctgtgggaaacagaccctggaacgcaggaagaggtcagtggcccaggccaccagcagcagcggggaggcccctgacagcatcacatggaagccatatgatgcagccgacctggaccccaccgagaaccccttcgacctgcttgacttcaaccagacgcagcctgagaggggcgacaacaacctcaccaggctgagcaagaataatgccatcgagcccagaatcgtgggaggccaggaatgcaaggacggggagtgtccctggcaggccctgctcatcaatgaggaaaacgagggtttctgtggtggaactattctgagcgagttctacatcctaacggcagcccactgtctctaccaagccaagagattcaaggtgagggtaggggaccggaacacggagcaggaggagggcggtgaggcggtgcacgaggtggaggtggtcatcaagcacaaccggttcacaaaggagacctatgacttcgacatcgccgtgctccggctcaagacccccatcaccttccgcatgaacgtggcgcctgcctgcctccccgagcgtgactgggccgagtccacgctgatgacgcagaagacggggattgtgagtggcttcgggcgcacccacgagaagggccggcagtccaccaggctcaagatgctggaggtgccctacgtggaccgcaacagctgcaagctgtccagcagcttcatcatcacccagaacatgttctgtgccggctacgacaccaagcaggaggatgcctgccagggggacagcgggggcccgcacgtcacccgcttcaaggacacctacttcgtgacaggcatcgtcagctggggagagggctgtgcccgtaaggggaagtacgggatctacaccaaggtcaccgccttcctcaagtggatcgacaggtccatgaaaaccaggggcttgcccaaggccaagagccatgccccggaggtcataacgtcctctccattaaaggaggaccaagtagatccgcggctcattgatgggaag

SEQ ID NO: 206 - protein, 423 aa, Artificial
  Recombinant
DQCETSPCQNQGKCKDGLGEYTCTCLEGFEGKNCELFTRKLCSLDNGDCDQFCHEEQNSVVCSCARGYTLADNGKACIPTGPYPCGKQTLERRKRSVAQATSSSGEAPDSITWKPYDAADLDPTENPFDLLDFNQTQPERGDNNLTRLSKNNAIEPRIVGGQECKDGECPWQALLINEENEGFCGGTILSEFYILTAAHCLYQAKRFKVRVGDRNTEQEEGGEAVHEVEVVIKHNRFTKETYDFDIAVLRLKTPITFRMNVAPACLPERDWAESTLMTQKTGIVSGFGRTHEKGRQSTRLKMLEVPYVDRNSCKLSSSFIITQNMFCAGYDTKQEDACQGDSGGPHVTRFKDTYFVTGIVSWGEGCARKGKYGIYTKVTAFLKWIDRSMKTRGLPKAKSHAPEVITSSPLKEDQVDPRLIDGK

SEQ ID NO: 207 - DNA, 1374 bp, Artificial
  Recombinant
gccaattcctttcttgaagagatgaagaaaggacacctcgaaagagagtgcatggaagagacctgctcatacgaagaggcccgcgaggtctttgaggacagcgacaagacgaatgaattctggaataaatacaaagatggcgaccagtgtgagaccagtccttgccagaaccagggcaaatgtaaagacggcctcggggaatacacctgtacctgtttagaaggattcgaaggcaaaaactgtgaattattcacacggaagctctgcagcctggacaacggggactgtgaccagttctgccacgaggaacagaactctgtggtgtgctcctgcgcccgcgggtacaccctggctgacaacggcaaggcctgcattcccacagggccctacccctgtgggaaacagaccctggaacgcaggaagaggtcagtggcccaggccaccagcagcagcggggaggcccctgacagcatcacatggaagccatatgatgcagccgacctggaccccaccgagaaccccttcgacctgcttgacttcaaccagacgcagcctgagaggggcgacaacaacctcaccaggctgagcaagaataatgccatcgagcccagaatcgtgggaggccaggaatgcaaggacggggagtgtccctggcaggccctgctcatcaatgaggaaaacgagggtttctgtggtggaactattctgagcgagttctacatcctaacggcagcccactgtctctaccaagccaagagattcaaggtgagggtaggggaccggaacacggagcaggaggagggcggtgaggcggtgcacgaggtggaggtggtcatcaagcacaaccggttcacaaaggagacctatgacttcgacatcgccgtgctccggctcaagacccccatcaccttccgcatgaacgtggcgcctgcctgcctccccgagcgtgactgggccgagtccacgctgatgacgcagaagacggggattgtgagtggcttcgggcgcacccacgagaagggccggcagtccaccaggctcaagatgctggaggtgccctacgtggaccgcaacagctgcaagctgtccagcagcttcatcatcacccagaacatgttctgtgccggctacgacaccaagcaggaggatgcctgccagggggacagcgggggcccgcacgtcacccgcttcaaggacacctacttcgtgacaggcatcgtcagctggggagagggctgtgcccgtaaggggaagtacgggatctacaccaaggtcaccgccttcctcaagtggatcgacaggtccatgaaaaccaggggcttgcccaaggccaagagccatgccccggaggtcataacgtcctctccattaaag

SEQ ID NO: 208 - protein, 458 aa, Artificial
  Recombinant
ANSFLEEMKKGHLERECMEETCSYEEAREVFEDSDKTNEFWNKYKDGDQCETSPCQNQGKCKDGLGEYTCTCLEGFEGKNCELFTRKLCSLDNGDCDQFCHEEQNSVVCSCARGYTLADNGKACIPTGPYPCGKQTLERRKRSVAQATSSSGEAPDSITWKPYDAADLDPTENPFDLLDFNQTQPERGDNNLTRLSKNNAIEPRIVGGQECKDGECPWQALLINEENEGFCGGTILSEFYILTAAHCLYQAKRFKVRVGDRNTEQEEGGEAVHEVEVVIKHNRFTKETYDFDIAVLRLKTPITFRMNVAPACLPERDWAESTLMTQKTGIVSGFGRTHEKGRQSTRLKMLEVPYVDRNSCKLSSSFIITQNMFCAGYDTKQEDACQGDSGGPHVTRFKDTYFVTGIVSWGEGCARKGKYGIYTKVTAFLKWIDRSMKTRGLPKAKSHAPEVITSSPLK

SEQ ID NO: 209 - DNA, 1269 bp, Artificial
  Recombinant
gaccagtgtgagaccagtccttgccagaaccagggcaaatgtaaagacggcctcggggaatacacctgtacctgtttagaaggattcgaaggcaaaaactgtgaattattcacacggaagctctgcagcctggacaacggggactgtgaccagttctgccacgaggaacagaactctgtggtgtgctcctgcgcccgcgggtacaccctggctgacaacggcaaggcctgcattcccacagggccctacccctgtgggaaacagaccctggaacgcaggaagaggtcagtggcccaggccaccagcagcagcggggaggcccctgacagcatcacatggaagccatatgatgcagccgacctggaccccaccgagaaccccttcgacctgcttgacttcaaccagacgcagcctgagaggggcgacaacaacctcaccaggtacgatgaggatgagaatcagagccccagaatcgtgggaggccaggaatgcaaggacggggagtgtccctggcaggccctgctcatcaatgaggaaaacgagggtttctgtggtggaactattctgagcgagttctacatcctaacggcagcccactgtctctaccaagccaagagattcaaggtgagggtaggggaccggaacacggagcaggaggagggcggtgaggcggtgcacgaggtggaggtggtcatcaagcacaaccggttcacaaaggagacctatgacttcgacatcgccgtgctccggctcaagacccccatcaccttccgcatgaacgtggcgcctgcctgcctccccgagcgtgactgggccgagtccacgctgatgacgcagaagacggggattgtgagtggcttcgggcgcacccacgagaagggccggcagtccaccaggctcaagatgctggaggtgccctacgtggaccgcaacagctgcaagctgtccagcagcttcatcatcacccagaacatgttctgtgccggctacgacaccaagcaggaggatgcctgccagggggacagcgggggcccgcacgtcacccgcttcaaggacacctacttcgtgacaggcatcgtcagctggggagagggctgtgcccgtaaggggaagtacgggatctacaccaaggtcaccgccttcctcaagtggatcgacaggtccatgaaaaccaggggcttgcccaaggccaagagccatgccccggaggtcataacgtcctctccattaaaggaggaccaagtagatccgcggctcattgatgggaag

SEQ ID NO: 210 - protein, 423 aa, Artificial
  Recombinant
DQCETSPCQNQGKCKDGLGEYTCTCLEGFEGKNCELFTRKLCSLDNGDCDQFCHEEQNSVVCSCARGYTLADNGKACIPTGPYPCGKQTLERRKRSVAQATSSSGEAPDSITWKPYDAADLDPTENPFDLLDFNQTQPERGDNNLTRYDEDENQSPRIVGGQECKDGECPWQALLINEENEGFCGGTILSEFYILTAAHCLYQAKRFKVRVGDRNTEQEEGGEAVHEVEVVIKHNRFTKETYDFDIAVLRLKTPITFRMNVAPACLPERDWAESTLMTQKTGIVSGFGRTHEKGRQSTRLKMLEVPYVDRNSCKLSSSFIITQNMFCAGYDTKQEDACQGDSGGPHVTRFKDTYFVTGIVSWGEGCARKGKYGIYTKVTAFLKWIDRSMKTRGLPKAKSHAPEVITSSPLKEDQVDPRLIDGK

SEQ ID NO: 211 - DNA, 1374 bp, Artificial
  Recombinant
gccaattcctttcttgaagagatgaagaaaggacacctcgaaagagagtgcatggaagagacctgctcatacgaagaggcccgcgaggtctttgaggacagcgacaagacgaatgaattctggaataaatacaaagatggcgaccagtgtgagaccagtccttgccagaaccagggcaaatgtaaagacggcctcggggaatacacctgtacctgtttagaaggattcgaaggcaaaaactgtgaattattcacacggaagctctgcagcctggacaacggggactgtgaccagttctgccacgaggaacagaactctgtggtgtgctcctgcgcccgcgggtacaccctggctgacaacggcaaggcctgcattcccacagggccctacccctgtgggaaacagaccctggaacgcaggaagaggtcagtggcccaggccaccagcagcagcggggaggcccctgacagcatcacatggaagccatatgatgcagccgacctggaccccaccgagaaccccttcgacctgcttgacttcaaccagacgcagcctgagaggggcgacaacaacctcaccaggtacgatgaggatgagaatcagagccccagaatcgtgggaggccaggaatgcaaggacggggagtgtccctggcaggccctgctcatcaatgaggaaaacgagggtttctgtggtggaactattctgagcgagttctacatcctaacggcagcccactgtctctaccaagccaagagattcaaggtgagggtaggggaccggaacacggagcaggaggagggcggtgaggcggtgcacgaggtggaggtggtcatcaagcacaaccggttcacaaaggagacctatgacttcgacatcgccgtgctccggctcaagacccccatcaccttccgcatgaacgtggcgcctgcctgcctccccgagcgtgactgggccgagtccacgctgatgacgcagaagacggggattgtgagtggcttcgggcgcacccacgagaagggccggcagtccaccaggctcaagatgctggaggtgccctacgtggaccgcaacagctgcaagctgtccagcagcttcatcatcacccagaacatgttctgtgccggctacgacaccaagcaggaggatgcctgccagggggacagcgggggcccgcacgtcacccgcttcaaggacacctacttcgtgacaggcatcgtcagctggggagagggctgtgcccgtaaggggaagtacgggatctacaccaaggtcaccgccttcctcaagtggatcgacaggtccatgaaaaccaggggcttgcccaaggccaagagccatgccccggaggtcataacgtcctctccattaaag

SEQ ID NO: 212 - protein, 458 aa, Artificial
  Recombinant
ANSFLEEMKKGHLERECMEETCSYEEAREVFEDSDKTNEFWNKYKDGDQCETSPCQNQGKCKDGLGEYTCTCLEGFEGKNCELFTRKLCSLDNGDCDQFCHEEQNSVVCSCARGYTLADNGKACIPTGPYPCGKQTLERRKRSVAQATSSSGEAPDSITWKPYDAADLDPTENPFDLLDFNQTQPERGDNNLTRYDEDENQSPRIVGGQECKDGECPWQALLINEENEGFCGGTILSEFYILTAAHCLYQAKRFKVRVGDRNTEQEEGGEAVHEVEVVIKHNRFTKETYDFDIAVLRLKTPITFRMNVAPACLPERDWAESTLMTQKTGIVSGFGRTHEKGRQSTRLKMLEVPYVDRNSCKLSSSFIITQNMFCAGYDTKQEDACQGDSGGPHVTRFKDTYFVTGIVSWGEGCARKGKYGIYTKVTAFLKWIDRSMKTRGLPKAKSHAPEVITSSPLK

SEQ ID NO: 213 - DNA, 1269 bp, Artificial
  Recombinant
gaccagtgtgagaccagtccttgccagaaccagggcaaatgtaaagacggcctcggggaatacacctgtacctgtttagaaggattcgaaggcaaaaactgtgaattattcacacggaagctctgcagcctggacaacggggactgtgaccagttctgccacgaggaacagaactctgtggtgtgctcctgcgcccgcgggtacaccctggctgacaacggcaaggcctgcattcccacagggccctacccctgtgggaaacagaccctggaacgcaggaagaggtcagtggcccaggccaccagcagcagcggggaggcccctgacagcatcacatggaagccatatgatgcagccgacctggaccccaccgagaaccccttcgacctgcttgacttcaaccagacgcagcctgagaggggcgacaacaacctcaccaggcacacccaccacgcccccctgagccccagaatcgtgggaggccaggaatgcaaggacggggagtgtccctggcaggccctgctcatcaatgaggaaaacgagggtttctgtggtggaactattctgagcgagttctacatcctaacggcagcccactgtctctaccaagccaagagattcaaggtgagggtaggggaccggaacacggagcaggaggagggcggtgaggcggtgcacgaggtggaggtggtcatcaagcacaaccggttcacaaaggagacctatgacttcgacatcgccgtgctccggctcaagacccccatcaccttccgcatgaacgtggcgcctgcctgcctccccgagcgtgactgggccgagtccacgctgatgacgcagaagacggggattgtgagtggcttcgggcgcacccacgagaagggccggcagtccaccaggctcaagatgctggaggtgccctacgtggaccgcaacagctgcaagctgtccagcagcttcatcatcacccagaacatgttctgtgccggctacgacaccaagcaggaggatgcctgccagggggacagcgggggcccgcacgtcacccgcttcaaggacacctacttcgtgacaggcatcgtcagctggggagagggctgtgcccgtaaggggaagtacgggatctacaccaaggtcaccgccttcctcaagtggatcgacaggtccatgaaaaccaggggcttgcccaaggccaagagccatgccccggaggtcataacgtcctctccattaaaggaggaccaagtagatccgcggctcattgatgggaag

SEQ ID NO: 214 - protein, 423 aa, Artificial
  Recombinant
DQCETSPCQNQGKCKDGLGEYTCTCLEGFEGKNCELFTRKLCSLDNGDCDQFCHEEQNSVVCSCARGYTLADNGKACIPTGPYPCGKQTLERRKRSVAQATSSSGEAPDSITWKPYDAADLDPTENPFDLLDFNQTQPERGDNNLTRHTHHAPLSPRIVGGQECKDGECPWQALLINEENEGFCGGTILSEFYILTAAHCLYQAKRFKVRVGDRNTEQEEGGEAVHEVEVVIKHNRFTKETYDFDIAVLRLKTPITFRMNVAPACLPERDWAESTLMTQKTGIVSGFGRTHEKGRQSTRLKMLEVPYVDRNSCKLSSSFIITQNMFCAGYDTKQEDACQGDSGGPHVTRFKDTYFVTGIVSWGEGCARKGKYGIYTKVTAFLKWIDRSMKTRGLPKAKSHAPEVITSSPLKEDQVDPRLIDGK

SEQ ID NO: 215 - DNA, 1374 bp, Artificial
  Recombinant
gccaattcctttcttgaagagatgaagaaaggacacctcgaaagagagtgcatggaagagacctgctcatacgaagaggcccgcgaggtctttgaggacagcgacaagacgaatgaattctggaataaatacaaagatggcgaccagtgtgagaccagtccttgccagaaccagggcaaatgtaaagacggcctcggggaatacacctgtacctgtttagaaggattcgaaggcaaaaactgtgaattattcacacggaagctctgcagcctggacaacggggactgtgaccagttctgccacgaggaacagaactctgtggtgtgctcctgcgcccgcgggtacaccctggctgacaacggcaaggcctgcattcccacagggccctacccctgtgggaaacagaccctggaacgcaggaagaggtcagtggcccaggccaccagcagcagcggggaggcccctgacagcatcacatggaagccatatgatgcagccgacctggaccccaccgagaaccccttcgacctgcttgacttcaaccagacgcagcctgagaggggcgacaacaacctcaccaggcacacccaccacgcccccctgagccccagaatcgtgggaggccaggaatgcaaggacggggagtgtccctggcaggccctgctcatcaatgaggaaaacgagggtttctgtggtggaactattctgagcgagttctacatcctaacggcagcccactgtctctaccaagccaagagattcaaggtgagggtaggggaccggaacacggagcaggaggagggcggtgaggcggtgcacgaggtggaggtggtcatcaagcacaaccggttcacaaaggagacctatgacttcgacatcgccgtgctccggctcaagacccccatcaccttccgcatgaacgtggcgcctgcctgcctccccgagcgtgactgggccgagtccacgctgatgacgcagaagacggggattgtgagtggcttcgggcgcacccacgagaagggccggcagtccaccaggctcaagatgctggaggtgccctacgtggaccgcaacagctgcaagctgtccagcagcttcatcatcacccagaacatgttctgtgccggctacgacaccaagcaggaggatgcctgccagggggacagcgggggcccgcacgtcacccgcttcaaggacacctacttcgtgacaggcatcgtcagctggggagagggctgtgcccgtaaggggaagtacgggatctacaccaaggtcaccgccttcctcaagtggatcgacaggtccatgaaaaccaggggcttgcccaaggccaagagccatgccccggaggtcataacgtcctctccattaaag

SEQ ID NO: 216 - protein, 458 aa, Artificial
  Recombinant
ANSFLEEMKKGHLERECMEETCSYEEAREVFEDSDKTNEFWNKYKDGDQCETSPCQNQGKCKDGLGEYTCTCLEGFEGKNCELFTRKLCSLDNGDCDQFCHEEQNSVVCSCARGYTLADNGKACIPTGPYPCGKQTLERRKRSVAQATSSSGEAPDSITWKPYDAADLDPTENPFDLLDFNQTQPERGDNNLTRHTHHAPLSPRIVGGQECKDGECPWQALLINEENEGFCGGTILSEFYILTAAHCLYQAKRFKVRVGDRNTEQEEGGEAVHEVEVVIKHNRFTKETYDFDIAVLRLKTPITFRMNVAPACLPERDWAESTLMTQKTGIVSGFGRTHEKGRQSTRLKMLEVPYVDRNSCKLSSSFIITQNMFCAGYDTKQEDACQGDSGGPHVTRFKDTYFVTGIVSWGEGCARKGKYGIYTKVTAFLKWIDRSMKTRGLPKAKSHAPEVITSSPLK

SEQ ID NO: 217 - DNA, 1269 bp, Artificial
  Recombinant
gaccagtgtgagaccagtccttgccagaaccagggcaaatgtaaagacggcctcggggaatacacctgtacctgtttagaaggattcgaaggcaaaaactgtgaattattcacacggaagctctgcagcctggacaacggggactgtgaccagttctgccacgaggaacagaactctgtggtgtgctcctgcgcccgcgggtacaccctggctgacaacggcaaggcctgcattcccacagggccctacccctgtgggaaacagaccctggaacgcaggaagaggtcagtggcccaggccaccagcagcagcggggaggcccctgacagcatcacatggaagccatatgatgcagccgacctggaccccaccgagaaccccttcgacctgcttgacttcaaccagacgcagcctgagaggggcgacaacaacctcaccaggaatagactggccgccgccctgggcatcagaatcgtgggaggccaggaatgcaaggacggggagtgtccctggcaggccctgctcatcaatgaggaaaacgagggtttctgtggtggaactattctgagcgagttctacatcctaacggcagcccactgtctctaccaagccaagagattcaaggtgagggtaggggaccggaacacggagcaggaggagggcggtgaggcggtgcacgaggtggaggtggtcatcaagcacaaccggttcacaaaggagacctatgacttcgacatcgccgtgctccggctcaagacccccatcaccttccgcatgaacgtggcgcctgcctgcctccccgagcgtgactgggccgagtccacgctgatgacgcagaagacggggattgtgagtggcttcgggcgcacccacgagaagggccggcagtccaccaggctcaagatgctggaggtgccctacgtggaccgcaacagctgcaagctgtccagcagcttcatcatcacccagaacatgttctgtgccggctacgacaccaagcaggaggatgcctgccagggggacagcgggggcccgcacgtcacccgcttcaaggacacctacttcgtgacaggcatcgtcagctggggagagggctgtgcccgtaaggggaagtacgggatctacaccaaggtcaccgccttcctcaagtggatcgacaggtccatgaaaaccaggggcttgcccaaggccaagagccatgccccggaggtcataacgtcctctccattaaaggaggaccaagtagatccgcggctcattgatgggaag

SEQ ID NO: 218 - protein, 423 aa, Artificial
  Recombinant
DQCETSPCQNQGKCKDGLGEYTCTCLEGFEGKNCELFTRKLCSLDNGDCDQFCHEEQNSVVCSCARGYTLADNGKACIPTGPYPCGKQTLERRKRSVAQATSSSGEAPDSITWKPYDAADLDPTENPFDLLDFNQTQPERGDNNLTRNRLAAALGIRIVGGQECKDGECPWQALLINEENEGFCGGTILSEFYILTAAHCLYQAKRFKVRVGDRNTEQEEGGEAVHEVEVVIKHNRFTKETYDFDIAVLRLKTPITFRMNVAPACLPERDWAESTLMTQKTGIVSGFGRTHEKGRQSTRLKMLEVPYVDRNSCKLSSSFIITQNMFCAGYDTKQEDACQGDSGGPHVTRFKDTYFVTGIVSWGEGCARKGKYGIYTKVTAFLKWIDRSMKTRGLPKAKSHAPEVITSSPLKEDQVDPRLIDGK

SEQ ID NO: 219 - DNA, 1374 bp, Artificial
  Recombinant
gccaattcctttcttgaagagatgaagaaaggacacctcgaaagagagtgcatggaagagacctgctcatacgaagaggcccgcgaggtctttgaggacagcgacaagacgaatgaattctggaataaatacaaagatggcgaccagtgtgagaccagtccttgccagaaccagggcaaatgtaaagacggcctcggggaatacacctgtacctgtttagaaggattcgaaggcaaaaactgtgaattattcacacggaagctctgcagcctggacaacggggactgtgaccagttctgccacgaggaacagaactctgtggtgtgctcctgcgcccgcgggtacaccctggctgacaacggcaaggcctgcattcccacagggccctacccctgtgggaaacagaccctggaacgcaggaagaggtcagtggcccaggccaccagcagcagcggggaggcccctgacagcatcacatggaagccatatgatgcagccgacctggaccccaccgagaaccccttcgacctgcttgacttcaaccagacgcagcctgagaggggcgacaacaacctcaccaggaatagactggccgccgccctgggcatcagaatcgtgggaggccaggaatgcaaggacggggagtgtccctggcaggccctgctcatcaatgaggaaaacgagggtttctgtggtggaactattctgagcgagttctacatcctaacggcagcccactgtctctaccaagccaagagattcaaggtgagggtaggggaccggaacacggagcaggaggagggcggtgaggcggtgcacgaggtggaggtggtcatcaagcacaaccggttcacaaaggagacctatgacttcgacatcgccgtgctccggctcaagacccccatcaccttccgcatgaacgtggcgcctgcctgcctccccgagcgtgactgggccgagtccacgctgatgacgcagaagacggggattgtgagtggcttcgggcgcacccacgagaagggccggcagtccaccaggctcaagatgctggaggtgccctacgtggaccgcaacagctgcaagctgtccagcagcttcatcatcacccagaacatgttctgtgccggctacgacaccaagcaggaggatgcctgccagggggacagcgggggcccgcacgtcacccgcttcaaggacacctacttcgtgacaggcatcgtcagctggggagagggctgtgcccgtaaggggaagtacgggatctacaccaaggtcaccgccttcctcaagtggatcgacaggtccatgaaaaccaggggcttgcccaaggccaagagccatgccccggaggtcataacgtcctctccattaaag

SEQ ID NO: 220 - protein, 458 aa, Artificial
  Recombinant
ANSFLEEMKKGHLERECMEETCSYEEAREVFEDSDKTNEFWNKYKDGDQCETSPCQNQGKCKDGLGEYTCTCLEGFEGKNCELFTRKLCSLDNGDCDQFCHEEQNSVVCSCARGYTLADNGKACIPTGPYPCGKQTLERRKRSVAQATSSSGEAPDSITWKPYDAADLDPTENPFDLLDFNQTQPERGDNNLTRNRLAAALGIRIVGGQECKDGECPWQALLINEENEGFCGGTILSEFYILTAAHCLYQAKRFKVRVGDRNTEQEEGGEAVHEVEVVIKHNRFTKETYDFDIAVLRLKTPITFRMNVAPACLPERDWAESTLMTQKTGIVSGFGRTHEKGRQSTRLKMLEVPYVDRNSCKLSSSFIITQNMFCAGYDTKQEDACQGDSGGPHVTRFKDTYFVTGIVSWGEGCARKGKYGIYTKVTAFLKWIDRSMKTRGLPKAKSHAPEVITSSPLK

SEQ ID NO: 221 - DNA, 1269 bp, Artificial
  Recombinant
gaccagtgtgagaccagtccttgccagaaccagggcaaatgtaaagacggcctcggggaatacacctgtacctgtttagaaggattcgaaggcaaaaactgtgaattattcacacggaagctctgcagcctggacaacggggactgtgaccagttctgccacgaggaacagaactctgtggtgtgctcctgcgcccgcgggtacaccctggctgacaacggcaaggcctgcattcccacagggccctacccctgtgggaaacagaccctggaacgcaggaagaggtcagtggcccaggccaccagcagcagcggggaggcccctgacagcatcacatggaagccatatgatgcagccgacctggaccccaccgagaaccccttcgacctgcttgacttcaaccagacgcagcctgagaggggcgacaacaacctcaccaggaaggccaccaatgccaccctggatcccagaatcgtgggaggccaggaatgcaaggacggggagtgtccctggcaggccctgctcatcaatgaggaaaacgagggtttctgtggtggaactattctgagcgagttctacatcctaacggcagcccactgtctctaccaagccaagagattcaaggtgagggtaggggaccggaacacggagcaggaggagggcggtgaggcggtgcacgaggtggaggtggtcatcaagcacaaccggttcacaaaggagacctatgacttcgacatcgccgtgctccggctcaagacccccatcaccttccgcatgaacgtggcgcctgcctgcctccccgagcgtgactgggccgagtccacgctgatgacgcagaagacggggattgtgagtggcttcgggcgcacccacgagaagggccggcagtccaccaggctcaagatgctggaggtgccctacgtggaccgcaacagctgcaagctgtccagcagcttcatcatcacccagaacatgttctgtgccggctacgacaccaagcaggaggatgcctgccagggggacagcgggggcccgcacgtcacccgcttcaaggacacctacttcgtgacaggcatcgtcagctggggagagggctgtgcccgtaaggggaagtacgggatctacaccaaggtcaccgccttcctcaagtggatcgacaggtccatgaaaaccaggggcttgcccaaggccaagagccatgccccggaggtcataacgtcctctccattaaaggaggaccaagtagatccgcggctcattgatgggaag

SEQ ID NO: 222 - protein, 423 aa, Artificial
  Recombinant
DQCETSPCQNQGKCKDGLGEYTCTCLEGFEGKNCELFTRKLCSLDNGDCDQFCHEEQNSVVCSCARGYTLADNGKACIPTGPYPCGKQTLERRKRSVAQATSSSGEAPDSITWKPYDAADLDPTENPFDLLDFNQTQPERGDNNLTRKATNATLDPRIVGGQECKDGECPWQALLINEENEGFCGGTILSEFYILTAAHCLYQAKRFKVRVGDRNTEQEEGGEAVHEVEVVIKHNRFTKETYDFDIAVLRLKTPITFRMNVAPACLPERDWAESTLMTQKTGIVSGFGRTHEKGRQSTRLKMLEVPYVDRNSCKLSSSFIITQNMFCAGYDTKQEDACQGDSGGPHVTRFKDTYFVTGIVSWGEGCARKGKYGIYTKVTAFLKWIDRSMKTRGLPKAKSHAPEVITSSPLKEDQVDPRLIDGK

SEQ ID NO: 223 - DNA, 1374 bp, Artificial
  Recombinant
gccaattcctttcttgaagagatgaagaaaggacacctcgaaagagagtgcatggaagagacctgctcatacgaagaggcccgcgaggtctttgaggacagcgacaagacgaatgaattctggaataaatacaaagatggcgaccagtgtgagaccagtccttgccagaaccagggcaaatgtaaagacggcctcggggaatacacctgtacctgtttagaaggattcgaaggcaaaaactgtgaattattcacacggaagctctgcagcctggacaacggggactgtgaccagttctgccacgaggaacagaactctgtggtgtgctcctgcgcccgcgggtacaccctggctgacaacggcaaggcctgcattcccacagggccctacccctgtgggaaacagaccctggaacgcaggaagaggtcagtggcccaggccaccagcagcagcggggaggcccctgacagcatcacatggaagccatatgatgcagccgacctggaccccaccgagaaccccttcgacctgcttgacttcaaccagacgcagcctgagaggggcgacaacaacctcaccaggaaggccaccaatgccaccctggatcccagaatcgtgggaggccaggaatgcaaggacggggagtgtccctggcaggccctgctcatcaatgaggaaaacgagggtttctgtggtggaactattctgagcgagttctacatcctaacggcagcccactgtctctaccaagccaagagattcaaggtgagggtaggggaccggaacacggagcaggaggagggcggtgaggcggtgcacgaggtggaggtggtcatcaagcacaaccggttcacaaaggagacctatgacttcgacatcgccgtgctccggctcaagacccccatcaccttccgcatgaacgtggcgcctgcctgcctccccgagcgtgactgggccgagtccacgctgatgacgcagaagacggggattgtgagtggcttcgggcgcacccacgagaagggccggcagtccaccaggctcaagatgctggaggtgccctacgtggaccgcaacagctgcaagctgtccagcagcttcatcatcacccagaacatgttctgtgccggctacgacaccaagcaggaggatgcctgccagggggacagcgggggcccgcacgtcacccgcttcaaggacacctacttcgtgacaggcatcgtcagctggggagagggctgtgcccgtaaggggaagtacgggatctacaccaaggtcaccgccttcctcaagtggatcgacaggtccatgaaaaccaggggcttgcccaaggccaagagccatgccccggaggtcataacgtcctctccattaaag

SEQ ID NO: 224 - protein, 458 aa, Artificial
  Recombinant
ANSFLEEMKKGHLERECMEETCSYEEAREVFEDSDKTNEFWNKYKDGDQCETSPCQNQGKCKDGLGEYTCTCLEGFEGKNCELFTRKLCSLDNGDCDQFCHEEQNSVVCSCARGYTLADNGKACIPTGPYPCGKQTLERRKRSVAQATSSSGEAPDSITWKPYDAADLDPTENPFDLLDFNQTQPERGDNNLTRKATNATLDPRIVGGQECKDGECPWQALLINEENEGFCGGTILSEFYILTAAHCLYQAKRFKVRVGDRNTEQEEGGEAVHEVEVVIKHNRFTKETYDFDIAVLRLKTPITFRMNVAPACLPERDWAESTLMTQKTGIVSGFGRTHEKGRQSTRLKMLEVPYVDRNSCKLSSSFIITQNMFCAGYDTKQEDACQGDSGGPHVTRFKDTYFVTGIVSWGEGCARKGKYGIYTKVTAFLKWIDRSMKTRGLPKAKSHAPEVITSSPLK

SEQ ID NO: 225 - DNA, 1269 bp, Artificial
  Recombinant
gaccagtgtgagaccagtccttgccagaaccagggcaaatgtaaagacggcctcggggaatacacctgtacctgtttagaaggattcgaaggcaaaaactgtgaattattcacacggaagctctgcagcctggacaacggggactgtgaccagttctgccacgaggaacagaactctgtggtgtgctcctgcgcccgcgggtacaccctggctgacaacggcaaggcctgcattcccacagggccctacccctgtgggaaacagaccctggaacgcaggaagaggtcagtggcccaggccaccagcagcagcggggaggcccctgacagcatcacatggaagccatatgatgcagccgacctggaccccaccgagaaccccttcgacctgcttgacttcaaccagacgcagcctgagaggggcgacaacaacctcaccagggatttcctggccgagggcggcggcgtgagaatcgtgggaggccaggaatgcaaggacggggagtgtccctggcaggccctgctcatcaatgaggaaaacgagggtttctgtggtggaactattctgagcgagttctacatcctaacggcagcccactgtctctaccaagccaagagattcaaggtgagggtaggggaccggaacacggagcaggaggagggcggtgaggcggtgcacgaggtggaggtggtcatcaagcacaaccggttcacaaaggagacctatgacttcgacatcgccgtgctccggctcaagacccccatcaccttccgcatgaacgtggcgcctgcctgcctccccgagcgtgactgggccgagtccacgctgatgacgcagaagacggggattgtgagtggcttcgggcgcacccacgagaagggccggcagtccaccaggctcaagatgctggaggtgccctacgtggaccgcaacagctgcaagctgtccagcagcttcatcatcacccagaacatgttctgtgccggctacgacaccaagcaggaggatgcctgccagggggacagcgggggcccgcacgtcacccgcttcaaggacacctacttcgtgacaggcatcgtcagctggggagagggctgtgcccgtaaggggaagtacgggatctacaccaaggtcaccgccttcctcaagtggatcgacaggtccatgaaaaccaggggcttgcccaaggccaagagccatgccccggaggtcataacgtcctctccattaaaggaggaccaagtagatccgcggctcattgatgggaag

SEQ ID NO: 226 - protein, 423 aa, Artificial
  REcombinant
DQCETSPCQNQGKCKDGLGEYTCTCLEGFEGKNCELFTRKLCSLDNGDCDQFCHEEQNSVVCSCARGYTLADNGKACIPTGPYPCGKQTLERRKRSVAQATSSSGEAPDSITWKPYDAADLDPTENPFDLLDFNQTQPERGDNNLTRDFLAEGGGVRIVGGQECKDGECPWQALLINEENEGFCGGTILSEFYILTAAHCLYQAKRFKVRVGDRNTEQEEGGEAVHEVEVVIKHNRFTKETYDFDIAVLRLKTPITFRMNVAPACLPERDWAESTLMTQKTGIVSGFGRTHEKGRQSTRLKMLEVPYVDRNSCKLSSSFIITQNMFCAGYDTKQEDACQGDSGGPHVTRFKDTYFVTGIVSWGEGCARKGKYGIYTKVTAFLKWIDRSMKTRGLPKAKSHAPEVITSSPLKEDQVDPRLIDGK

SEQ ID NO: 227 - DNA, 1269 bp, Artificial
  Recombinant
gaccagtgtgagaccagtccttgccagaaccagggcaaatgtaaagacggcctcggggaatacacctgtacctgtttagaaggattcgaaggcaaaaactgtgaattattcacacggaagctctgcagcctggacaacggggactgtgaccagttctgccacgaggaacagaactctgtggtgtgctcctgcgcccgcgggtacaccctggctgacaacggcaaggcctgcattcccacagggccctacccctgtgggaaacagaccctggaacgcaggaagaggtcagtggcccaggccaccagcagcagcggggaggcccctgacagcatcacatggaagccatatgatgcagccgacctggaccccaccgagaaccccttcgacctgcttgacttcaaccagacgcagcctgagaggggcgacaacaacctcaccagggatttcctggccgagggcggcggccccagaatcgtgggaggccaggaatgcaaggacggggagtgtccctggcaggccctgctcatcaatgaggaaaacgagggtttctgtggtggaactattctgagcgagttctacatcctaacggcagcccactgtctctaccaagccaagagattcaaggtgagggtaggggaccggaacacggagcaggaggagggcggtgaggcggtgcacgaggtggaggtggtcatcaagcacaaccggttcacaaaggagacctatgacttcgacatcgccgtgctccggctcaagacccccatcaccttccgcatgaacgtggcgcctgcctgcctccccgagcgtgactgggccgagtccacgctgatgacgcagaagacggggattgtgagtggcttcgggcgcacccacgagaagggccggcagtccaccaggctcaagatgctggaggtgccctacgtggaccgcaacagctgcaagctgtccagcagcttcatcatcacccagaacatgttctgtgccggctacgacaccaagcaggaggatgcctgccagggggacagcgggggcccgcacgtcacccgcttcaaggacacctacttcgtgacaggcatcgtcagctggggagagggctgtgcccgtaaggggaagtacgggatctacaccaaggtcaccgccttcctcaagtggatcgacaggtccatgaaaaccaggggcttgcccaaggccaagagccatgccccggaggtcataacgtcctctccattaaaggaggaccaagtagatccgcggctcattgatgggaag

SEQ ID NO: 228 - protein, 423 aa, Artificial
  Recombinant
DQCETSPCQNQGKCKDGLGEYTCTCLEGFEGKNCELFTRKLCSLDNGDCDQFCHEEQNSVVCSCARGYTLADNGKACIPTGPYPCGKQTLERRKRSVAQATSSSGEAPDSITWKPYDAADLDPTENPFDLLDFNQTQPERGDNNLTRDFLAEGGGPRIVGGQECKDGECPWQALLINEENEGFCGGTILSEFYILTAAHCLYQAKRFKVRVGDRNTEQEEGGEAVHEVEVVIKHNRFTKETYDFDIAVLRLKTPITFRMNVAPACLPERDWAESTLMTQKTGIVSGFGRTHEKGRQSTRLKMLEVPYVDRNSCKLSSSFIITQNMFCAGYDTKQEDACQGDSGGPHVTRFKDTYFVTGIVSWGEGCARKGKYGIYTKVTAFLKWIDRSMKTRGLPKAKSHAPEVITSSPLKEDQVDPRLIDGK

SEQ ID NO: 229 - DNA, 1488 bp, Artificial
  Recombinant
gccaattcctttcttgaagagatgaagaaaggacacctcgaaagagagtgcatggaagagacctgctcatacgaagaggcccgcgaggtctttgaggacagcgacaagacgaatgaattctggaataaatacaaagatggcgaccagtgtgagaccagtccttgccagaaccagggcaaatgtaaagacggcctcggggaatacacctgcacctgtttagaaggattcgaaggcaaaaactgtgaattattcacacggaagctctgcagcctggacaacggggactgtgaccagttctgccacgaggaacagaactctgtggtgtgctcctgcgcccgcgggtacaccctggctgacaacggcaaggcctgcattcccacagggccctacccctgtgggaaacagaccctggaacgcaggaagaggtcagtggcccaggccaccagcagcagcggggaggcccctgacagcatcacatggaagccatatgatgcagccgacctggaccccaccgagaaccccttcgacctgcttgacttcaaccagacgcagcctgagaggggcgacaacggcggcggcagcggcggcggcaaggaggaggaggacatcgagttcgaggagttcgagagcagccccaagcccgacggcagcggcggcggcagcggcggcggcaacgccaccctggaccccaggatcgtgggaggccaggaatgcaaggacggggagtgtccctggcaggccctgctcatcaatgaggaaaacgagggtttctgtggtggaactattctgagcgagttctacatcctaacggcagcccactgtctctaccaagccaagagattcaaggtgagggtaggggaccggaacacggagcaggaggagggcggtgaggcggtgcacgaggtggaggtggtcatcaagcacaaccggttcacaaaggagacctatgacttcgacatcgccgtgctccggctcaagacccccatcaccttccgcatgaacgtggcgcctgcctgcctccccgagcgtgactgggccgagtccacgctgatgacgcagaagacggggattgtgagtggcttcgggcgcacccacgagaagggccggcagtccaccaggctcaagatgctggaggtgccctacgtggaccgcaacagctgcaagctgtccagcagcttcatcatcacccagaacatgttctgtgccggctacgacaccaagcaggaggatgcctgccagggggacagcgggggcccgcacgtcacccgcttcaaggacacctacttcgtgacaggcatcgtcagctggggagagggctgtgcccgtaaggggaagtacgggatctacaccaaggtcaccgccttcctcaagtggatcgacaggtccatgaaaaccaggggcttgcccaaggccaagagccatgccccggaggtcataacgtcctctccattaaaagaccaagtagatccgcggctcattgatgggaag

SEQ ID NO: 230 - protein, 496 aa, Artificial
  Recombinant
ANSFLEEMKKGHLERECMEETCSYEEAREVFEDSDKTNEFWNKYKDGDQCETSPCQNQGKCKDGLGEYTCTCLEGFEGKNCELFTRKLCSLDNGDCDQFCHEEQNSVVCSCARGYTLADNGKACIPTGPYPCGKQTLERRKRSVAQATSSSGEAPDSITWKPYDAADLDPTENPFDLLDFNQTQPERGDNGGGSGGGKEEEDIEFEEFESSPKPDGSGGGSGGGNATLDPRIVGGQECKDGECPWQALLINEENEGFCGGTILSEFYILTAAHCLYQAKRFKVRVGDRNTEQEEGGEAVHEVEVVIKHNRFTKETYDFDIAVLRLKTPITFRMNVAPACLPERDWAESTLMTQKTGIVSGFGRTHEKGRQSTRLKMLEVPYVDRNSCKLSSSFIITQNMFCAGYDTKQEDACQGDSGGPHVTRFKDTYFVTGIVSWGEGCARKGKYGIYTKVTAFLKWIDRSMKTRGLPKAKSHAPEVITSSPLKDQVDPRLIDGK

SEQ ID NO: 231 - DNA, 1455 bp, Artificial
  Recombinant
gccaattcctttcttgaagagatgaagaaaggacacctcgaaagagagtgcatggaagagacctgctcatacgaagaggcccgcgaggtctttgaggacagcgacaagacgaatgaattctggaataaatacaaagatggcgaccagtgtgagaccagtccttgccagaaccagggcaaatgtaaagacggcctcggggaatacacctgcacctgtttagaaggattcgaaggcaaaaactgtgaattattcacacggaagctctgcagcctggacaacggggactgtgaccagttctgccacgaggaacagaactctgtggtgtgctcctgcgcccgcgggtacaccctggctgacaacggcaaggcctgcattcccacagggccctacccctgtgggaaacagaccctggaacgcaggaagaggtcagtggcccaggccaccagcagcagcggggaggcccctgacagcatcacatggaagccatatgatgcagccgacctggaccccaccgagaaccccttcgacctgcttgacttcaaccagacgcagcctgagaggggcgacaacggcggcggcagcggcggcggcaaggaggaggaggacatcgagttcgaggagttcgagagcagccccaagcccgacggcagcggcggcggcagcggcggcggcaacgccaccctggaccccaggatcgtgggaggccaggaatgcaaggacggggagtgtccctggcaggccctgctcatcaatgaggaaaacgagggtttctgtggtggaactattctgagcgagttctacatcctaacggcagcccactgtctctaccaagccaagagattcaaggtgagggtaggggaccggaacacggagcaggaggagggcggtgaggcggtgcacgaggtggaggtggtcatcaagcacaaccggttcacaaaggagacctatgacttcgacatcgccgtgctccggctcaagacccccatcaccttccgcatgaacgtggcgcctgcctgcctccccgagcgtgactgggccgagtccacgctgatgacgcagaagacggggattgtgagtggcttcgggcgcacccacgagaagggccggcagtccaccaggctcaagatgctggaggtgccctacgtggaccgcaacagctgcaagctgtccagcagcttcatcatcacccagaacatgttctgtgccggctacgacaccaagcaggaggatgcctgccagggggacagcgggggcccgcacgtcacccgcttcaaggacacctacttcgtgacaggcatcgtcagctggggagagggctgtgcccgtaaggggaagtacgggatctacaccaaggtcaccgccttcctcaagtggatcgacaggtccatgaaaaccaggggcttgcccaaggccaagagccatgccccggaggtcataacgtcctctccattaaaa

SEQ ID NO: 232 - protein, 485 aa, Artificial
  Recombinant
ANSFLEEMKKGHLERECMEETCSYEEAREVFEDSDKTNEFWNKYKDGDQCETSPCQNQGKCKDGLGEYTCTCLEGFEGKNCELFTRKLCSLDNGDCDQFCHEEQNSVVCSCARGYTLADNGKACIPTGPYPCGKQTLERRKRSVAQATSSSGEAPDSITWKPYDAADLDPTENPFDLLDFNQTQPERGDNGGGSGGGKEEEDIEFEEFESSPKPDGSGGGSGGGNATLDPRIVGGQECKDGECPWQALLINEENEGFCGGTILSEFYILTAAHCLYQAKRFKVRVGDRNTEQEEGGEAVHEVEVVIKHNRFTKETYDFDIAVLRLKTPITFRMNVAPACLPERDWAESTLMTQKTGIVSGFGRTHEKGRQSTRLKMLEVPYVDRNSCKLSSSFIITQNMFCAGYDTKQEDACQGDSGGPHVTRFKDTYFVTGIVSWGEGCARKGKYGIYTKVTAFLKWIDRSMKTRGLPKAKSHAPEVITSSPLK

SEQ ID NO: 233 - DNA, 1488 bp, Artificial
  Recombinant
gccaattcctttcttgaagagatgaagaaaggacacctcgaaagagagtgcatggaagagacctgctcatacgaagaggcccgcgaggtctttgaggacagcgacaagacgaatgaattctggaataaatacaaagatggcgaccagtgtgagaccagtccttgccagaaccagggcaaatgtaaagacggcctcggggaatacacctgcacctgtttagaaggattcgaaggcaaaaactgtgaattattcacacggaagctctgcagcctggacaacggggactgtgaccagttctgccacgaggaacagaactctgtggtgtgctcctgcgcccgcgggtacaccctggctgacaacggcaaggcctgcattcccacagggccctacccctgtgggaaacagaccctggaacgcaggaagaggtcagtggcccaggccaccagcagcagcggggaggcccctgacagcatcacatggaagccatatgatgcagccgacctggaccccaccgagaaccccttcgacctgcttgacttcaaccagacgcagcctgagaggggcgacaacggcggcggcagcggcggcggcagcggcgaccccaagcccagcagcgagttcgaggagttcgagatcgacgaggaggagaagggcggcggcagcggcggcggcaacgccaccctggaccccaggatcgtgggaggccaggaatgcaaggacggggagtgtccctggcaggccctgctcatcaatgaggaaaacgagggtttctgtggtggaactattctgagcgagttctacatcctaacggcagcccactgtctctaccaagccaagagattcaaggtgagggtaggggaccggaacacggagcaggaggagggcggtgaggcggtgcacgaggtggaggtggtcatcaagcacaaccggttcacaaaggagacctatgacttcgacatcgccgtgctccggctcaagacccccatcaccttccgcatgaacgtggcgcctgcctgcctccccgagcgtgactgggccgagtccacgctgatgacgcagaagacggggattgtgagtggcttcgggcgcacccacgagaagggccggcagtccaccaggctcaagatgctggaggtgccctacgtggaccgcaacagctgcaagctgtccagcagcttcatcatcacccagaacatgttctgtgccggctacgacaccaagcaggaggatgcctgccagggggacagcgggggcccgcacgtcacccgcttcaaggacacctacttcgtgacaggcatcgtcagctggggagagggctgtgcccgtaaggggaagtacgggatctacaccaaggtcaccgccttcctcaagtggatcgacaggtccatgaaaaccaggggcttgcccaaggccaagagccatgccccggaggtcataacgtcctctccattaaaagaccaagtagatccgcggctcattgatgggaag

SEQ ID NO: 234 - protein, 496 aa, Artificial
  Recombinant
ANSFLEEMKKGHLERECMEETCSYEEAREVFEDSDKTNEFWNKYKDGDQCETSPCQNQGKCKDGLGEYTCTCLEGFEGKNCELFTRKLCSLDNGDCDQFCHEEQNSVVCSCARGYTLADNGKACIPTGPYPCGKQTLERRKRSVAQATSSSGEAPDSITWKPYDAADLDPTENPFDLLDFNQTQPERGDNGGGSGGGSGDPKPSSEFEEFEIDEEEKGGGSGGGNATLDPRIVGGQECKDGECPWQALLINEENEGFCGGTILSEFYILTAAHCLYQAKRFKVRVGDRNTEQEEGGEAVHEVEVVIKHNRFTKETYDFDIAVLRLKTPITFRMNVAPACLPERDWAESTLMTQKTGIVSGFGRTHEKGRQSTRLKMLEVPYVDRNSCKLSSSFIITQNMFCAGYDTKQEDACQGDSGGPHVTRFKDTYFVTGIVSWGEGCARKGKYGIYTKVTAFLKWIDRSMKTRGLPKAKSHAPEVITSSPLKDQVDPRLIDGK

SEQ ID NO: 235 - DNA, 1455 bp, Artificial
  Recombinant
gccaattcctttcttgaagagatgaagaaaggacacctcgaaagagagtgcatggaagagacctgctcatacgaagaggcccgcgaggtctttgaggacagcgacaagacgaatgaattctggaataaatacaaagatggcgaccagtgtgagaccagtccttgccagaaccagggcaaatgtaaagacggcctcggggaatacacctgcacctgtttagaaggattcgaaggcaaaaactgtgaattattcacacggaagctctgcagcctggacaacggggactgtgaccagttctgccacgaggaacagaactctgtggtgtgctcctgcgcccgcgggtacaccctggctgacaacggcaaggcctgcattcccacagggccctacccctgtgggaaacagaccctggaacgcaggaagaggtcagtggcccaggccaccagcagcagcggggaggcccctgacagcatcacatggaagccatatgatgcagccgacctggaccccaccgagaaccccttcgacctgcttgacttcaaccagacgcagcctgagaggggcgacaacggcggcggcagcggcggcggcagcggcgaccccaagcccagcagcgagttcgaggagttcgagatcgacgaggaggagaagggcggcggcagcggcggcggcaacgccaccctggaccccaggatcgtgggaggccaggaatgcaaggacggggagtgtccctggcaggccctgctcatcaatgaggaaaacgagggtttctgtggtggaactattctgagcgagttctacatcctaacggcagcccactgtctctaccaagccaagagattcaaggtgagggtaggggaccggaacacggagcaggaggagggcggtgaggcggtgcacgaggtggaggtggtcatcaagcacaaccggttcacaaaggagacctatgacttcgacatcgccgtgctccggctcaagacccccatcaccttccgcatgaacgtggcgcctgcctgcctccccgagcgtgactgggccgagtccacgctgatgacgcagaagacggggattgtgagtggcttcgggcgcacccacgagaagggccggcagtccaccaggctcaagatgctggaggtgccctacgtggaccgcaacagctgcaagctgtccagcagcttcatcatcacccagaacatgttctgtgccggctacgacaccaagcaggaggatgcctgccagggggacagcgggggcccgcacgtcacccgcttcaaggacacctacttcgtgacaggcatcgtcagctggggagagggctgtgcccgtaaggggaagtacgggatctacaccaaggtcaccgccttcctcaagtggatcgacaggtccatgaaaaccaggggcttgcccaaggccaagagccatgccccggaggtcataacgtcctctccattaaaa

SEQ ID NO: 236 - protein, 485 aa, Artificial
  Recombinant
ANSFLEEMKKGHLERECMEETCSYEEAREVFEDSDKTNEFWNKYKDGDQCETSPCQNQGKCKDGLGEYTCTCLEGFEGKNCELFTRKLCSLDNGDCDQFCHEEQNSVVCSCARGYTLADNGKACIPTGPYPCGKQTLERRKRSVAQATSSSGEAPDSITWKPYDAADLDPTENPFDLLDFNQTQPERGDNGGGSGGGSGDPKPSSEFEEFEIDEEEKGGGSGGGNATLDPRIVGGQECKDGECPWQALLINEENEGFCGGTILSEFYILTAAHCLYQAKRFKVRVGDRNTEQEEGGEAVHEVEVVIKHNRFTKETYDFDIAVLRLKTPITFRMNVAPACLPERDWAESTLMTQKTGIVSGFGRTHEKGRQSTRLKMLEVPYVDRNSCKLSSSFIITQNMFCAGYDTKQEDACQGDSGGPHVTRFKDTYFVTGIVSWGEGCARKGKYGIYTKVTAFLKWIDRSMKTRGLPKAKSHAPEVITSSPLK

SEQ ID NO: 237 - protein, 15 aa, Artificial
  Recombinant
  misc_feature (7)..(8): Xaa can be any naturally occurring amino acid
KATNATXXPRIVGGK

SEQ ID NO: 238 - protein, 15 aa, Artificial
  Recombinant
  misc_feature (7)..(8): Xaa can be any naturally occurring amino acid
KATNATXXPRIVGGK

SEQ ID NO: 239 - protein, 16 aa, Artificial
  Recombinant
  misc_feature (2)..(11): Xaa can be any naturally occurring amino acid
KXXXXXXXXXXIVGGK

SEQ ID NO: 240 - protein, 16 aa, Artificial
  Recombinant
KDFLAEGGGVRIVGGK

SEQ ID NO: 241 - protein, 15 aa, Artificial
  Recombinant
KATNATLDPRIVGGK

SEQ ID NO: 242 - protein, 36 aa, Artificial
  Recombinant
  misc_feature (14)..(15): Xaa can be any naturally occurring amino acid
  misc_feature (18)..(20): Xaa can be any naturally occurring amino acid
DFNQTQPERGDNNXXATXXXRIVGGQECKDGECPWQ

SEQ ID NO: 243 - DNA, 24 bp, Artificial
  Recombinant
gtacaccctggctgacaacggcaa

SEQ ID NO: 244 - DNA, 71 bp, Artificial
  Recombinant
gcattcctggcctcccacgatcctcacgcctcctccttcagctagaaagtccctggtgaggttgttgtcgc

SEQ ID NO: 245 - DNA, 71 bp, Artificial
  Recombinant
gcgacaacaacctcaccagggactttctagctgaaggaggaggcgtgaggatcgtgggaggccaggaatgc

SEQ ID NO: 246 - DNA, 24 bp, Artificial
  Recombinant
cgatgcctgtcacgaagtaggtgt
